(19) United States
(12) Patent Application Publication
(10) Pub. No.: US 2025/0290143 A1
(43) Pub. Date: Sep. 18, 2025

(54) METHODS AND SYSTEMS FOR SELECTION AND TREATMENT OF PATIENTS WITH INFLAMMATORY DISEASES

(71) Applicants: CEDARS-SINAI MEDICAL CENTER, Los Angeles, CA (US); PROMETHEUS BIOSCIENCES, INC., La Jolla, CA (US)

(72) Inventors: Janine BILSBOROUGH, Adelaide (AU); Dermot P. MCGOVERN, Los Angeles, CA (US); Stephan TARGAN, Los Angeles, CA (US); Alka POTDAR, Cumming, CA (US); Jeffry D. WATKINS, Encinitas, CA (US); Cindy T. DICKERSON, Encinitas, CA (US)

(21) Appl. No.: 19/051,782

(22) Filed: Feb. 12, 2025

Related U.S. Application Data
(62) Division of application No. 17/051,731, filed on Oct. 29, 2020, now Pat. No. 12,305,236.
(60) Provisional application No. 62/664,720, filed on Apr. 30, 2018.
(60) Provisional application No. 62/681,557, filed on Jun. 6, 2018.
(60) Provisional application No. 62/784,179, filed on Dec. 21, 2018.

(51) Int. Cl. C12Q 1/6883; A61K 39/00; A61P 1/00; A61P 37/06; C07K 16/28

(52) U.S. Cl. CPC C12Q 1/6883; A61P 1/00; A61P 37/06; C07K 16/2875; A61K 2039/505; C12Q 2600/106; C12Q 2600/156

(57) ABSTRACT

Described herein are methods and systems for identifying subjects suitable for treatment with an inhibitor of CD30L activity or expression, such as an anti-CD30L antibody. Methods and systems disclosed herein identify subjects suitable for treatment based on a presence of a genotype that is indicative of a disease or condition in the subject for which an inhibitor of CD30L is a suitable treatment. Exemplary conditions include both Crohn's disease and primary sclerosing cholangitis. Compositions used to detect the genotypes described herein, and methods of using them are also provided.

### CROSS-REFERENCE

[0001] This application is a divisional of U.S. patent application Ser. No. 17/051,731, filed Oct. 29, 2020, now issued as U.S. Pat. No. 12,305,236 on May 20, 2025, which is a § 371 U.S. national stage entry of International Patent Application Number PCT/US2019/029402, filed Apr. 26, 2019, which claims priority to U.S. Provisional Application Ser. No. 62/664,720 filed Apr. 30, 2018, U.S. Provisional Application Ser. No. 62/681,557 filed Jun. 6, 2018, and U.S. Provisional Application Ser. No. 62/784,179 filed Dec. 21, 2018, each of which are incorporated herein by reference in their entirety.

### SEQUENCE LISTING

[0002] The instant application contains a Sequence Listing which has been submitted electronically in XML format and is hereby incorporated by reference in its entirety. Said XML copy, created Feb. 11, 2025, is named 56884-740.401_SL.xml and is 40,868,369 bytes in size.

### BACKGROUND

[0003] Inflammatory disease, fibrostenotic disease, and fibrotic disease pose a significant health burden worldwide due to the vast number of individuals affected and heterogeneous disease pathogenesis and varied clinical manifestations. One such disease is inflammatory bowel disease (IBD), which has two common forms, Crohn's disease (CD) and ulcerative colitis (UC). IBD is comprises of chronic, relapsing inflammatory disorders of the gastrointestinal tract. Incidences of IBD are prevalent, affecting nearly three million individuals in the United States alone. Each of these forms has various sub-conditions known as subclinical phenotypes that are present in sub-populations of CD and UC patients. One such condition is obstructive Crohn's disease, which can result from long term inflammation that may lead to the formation of scar tissue in the intestinal wall (fibrostenosis) or swelling. Both outcomes can cause narrowing, or obstruction, and are known as either fibrotic or inflammatory strictures. Severe strictures can lead to blockage of the intestine, leading to abdominal pain, bloating, nausea and the inability to pass stool.

[0004] Few treatment options are available to patients that suffer from inflammatory disease, fibrostenotic disease, and fibrotic disease. Existing anti-inflammatory therapy such as steroids and tumor necrosis factor (TNF) inhibitors are typically use as a first line treatment for treating IBD. Unfortunately, a significant number of patients experience a lack of response or a loss of response to existing anti-inflammatory therapies, especially TNF inhibitors. While the patient is treated with an anti-inflammatory therapy that is ineffective, the disease worsens. Surgery, in the form of structureplasty (reshaping of the intestine) or resection (removal of the intestine), is the only treatment option for patients that do not respond to first line therapies. Surgical treatments for IBD are invasive, causing post-operative risks for an estimated third of patients undergoing surgery, such as anastomotic leak, infection, and bleeding.

[0005] The pathogenesis of inflammatory disease, fibrostenotic disease, and fibrotic disease, like IBD is thought to involve an uncontrolled immune response that may be triggered by certain environmental factors in a genetically susceptible host. The heterogeneity of disease pathogenesis and clinical course, combined with the variable response to treatment and its associated side effects, suggests a personalized medicine approach to treating these diseases is best treatment strategy. Yet there are very few personalized therapies available to patients. Accordingly, there is a need to identify targeted therapeutic approaches for the treatment of inflammatory disease, fibrostenotic disease, and fibrotic disease and subclinical phenotypes thereof, and an even greater need to develop reliable methodology to identifying patients who, based on their genotype, who may respond to any given therapeutic approach. The needed methodologies would also identify subjects not yet diagnosed who are at risk of developing the disease, for which preventative interventions could be prescribed to reduce the growing health burden.

### SUMMARY

[0006] CD30 ligand (CD30L) is a ligand of CD30 encoded by the gene tumor necrosis factor receptor superfamily 8 or (TNFSF8). CD30L is a member of the tumor necrosis factor superfamily and is important in co-stimulation of immune cells to induce cellular proliferation and cytokine production. In some cases, CD30L acts on proinflammatory cytokines, such as interleukin 6 (IL-6). Preliminary studies suggest that the CD30L pathway is a dominant pathway in the pathogenesis of inflammatory, fibrotic and fibrostenotic disease such as IBD, especially in certain subsets of patients with complicated forms of the disease (e.g., such as stricturing, penetrating, or obstructive disease phenotypes).

[0007] Aspects of the present application provide methods and system for treating an inflammatory disease in a subject with an inhibitor of CD30L. In some cases, the CD30L inhibitor inhibits, attenuates, or otherwise interferes with a biological response related to CD30L interaction with its cognate antigen, CD30. Accordingly, in some cases treatment with a CD30L inhibitor is useful to treat conditions with which an expression or activity of CD30 ligand or CD30 are associated.

[0008] Also described herein, are polymorphisms and haplotypes thereof at the TNFSF8 gene or genetic locus that are associated with inflammatory, fibrotic or fibrostenotic disease. TNFSF8 polymorphisms may be associated with inflammatory bowel disease (IBD) and various subclinical phenotypes of IBD. In addition, these polymorphisms affect expression of CD30L, and in some cases, CD30. Genotypes comprising the TNFSF8 polymorphisms described herein can be detected in a sample obtained from a subject who may or may not be diagnosed with IBD. Detection of the genotypes, facilitated by existing genotyping assays, can be done at the point of need or in medical health care facility. Exemplary genotyping assays involve hybridization assays using nucleic acid probes specific for said polymorphisms.

[0009] Practical applications of the associations between the genotypes described herein and incidences of clinical and subclinical phenotypes in certain populations of individuals are provided herein. For example, the genotypes of the present disclosure can be used to predict a risk that a subject will develop an inflammatory disease, fibrostenotic disease, or a fibrotic disease. The genotypes are also useful to predict whether a patient diagnosed with some form of an inflammatory, fibrotic or fibrostenotic disease will develop a severe form of the disease, such as a subclinical phenotype thereof. In addition, or alternatively, the genotypes disclosed herein are associated with an variation in an expression of CD30 or CD30L, which in some cases, means the genotypes can be used to identify a patient who may be suitable for treatment with a targeted CD30L therapy (e.g., a patient carrying a genotype associated with an increase in CD30L may be suitable for a treatment with an anti-CD30L or anti-CD30 therapy). Exemplary conditions include both Crohn's disease (CD) and primary sclerosing cholangitis. In some cases, a subject is administered a therapeutic agent (e.g., CD30L inhibitor, TL1A inhibitor) provided the genotype disclosed herein is detected in a sample obtained from the subject. A further example of practical applications disclosed herein include laboratory-based methods of detecting the instant genotypes, such as quantitative PCR (qPCR) and sequencing methodologies.

[0010] Aspects disclosed herein provide methods of inhibiting or reducing CD30 ligand activity or expression in a subject, the method comprising: (a) selecting a subject having, or suspected of having, at least one of an inflammatory disease, a fibrostenotic disease, and a fibrotic disease; (b) identifying the subject as being a carrier of a genotype comprising a polymorphism at least one of rs911605 and rs1006026; and (c) administering to the subject an effective amount of an inhibitor of CD30 ligand to inhibit or reduce CD30 ligand activity or expression in the subject. In some embodiments, the polymorphism at rs911605 comprises an “A” allele at nucleobase 501 within rs911605 (SEQ ID NO: 1), and wherein the polymorphism at rs1006026 comprises a “G” allele at nucleobase 501 within rs1006026 (SEQ ID NO: 3). In some embodiments, the genotype comprises the polymorphism at rs911605 and the polymorphism at rs1006026. In some embodiments, the polymorphism at rs911605 comprises an “A” allele at nucleobase 501 within rs911605 (SEQ ID NO: 1), and the polymorphism at rs1006026 comprises a “G” allele at nucleobase 501 within rs1006026 (SEQ ID NO: 3). In some embodiments, identifying the subject as being a carrier of the genotype comprises: (a) contacting a sample obtained from the subject comprising genetic material with a nucleic acid sequence capable of hybridizing to at least 10 contiguous nucleobases between nucleobase 400 and nucleobase 600 of at least one of SEQ ID NO: 1 and SEQ ID NO: 3 under standard hybridization conditions, wherein the at least 10 contiguous nucleobases comprises nucleobase at position 501 of the at least one of SEQ ID NO: 1 and SEQ ID NO: 3; and (b) detecting binding between the nucleic acid sequence and the at least 10 contiguous nucleobases between nucleobase 400 and nucleobase 600 of at least one of SEQ ID NO: 1 and SEQ ID NO: 2. In some embodiments, the inhibitor of CD30 ligand is an antibody or an antigen-binding fragment targeting CD30 ligand or CD30, or a combination thereof. In some embodiments, methods further comprise administering to the subject an additional therapeutic agent. In some embodiments, the additional therapeutic agent is a modulator of an expression of a gene or an expression or an activity of a gene expression product, the gene selected from the group consisting of Mitogen-Activated Protein Kinase Kinase Kinase Kinase 4 (MAP4K4), Prostaglandin E Receptor 4 (PTGER4), interleukin 18 receptor 1 (IL18R1). 6-Phosphofructo-2-Kinase/Fructose-2,6-Biphosphatase 3 (PFKFB3), Interleukin 18 Receptor Accessory Protein (IL18RAP), Adenylate Cyclase 7 (ADCY7), B Lymphoid Tyrosine Kinase (BLK), G Protein-Coupled Receptor 65 (GPR65), Sprouty Related EVH1 Domain Containing 2 (SPRED2), Src Kinase Associated Phosphoprotein 2 (SKAP2), Receptor Interacting Serine/Threonine Kinase 2 (RIPK2), and TNF Ligand Superfamily Member 15 (TNFSF15), Janus Kinase 1 (JAK1) G-protein Coupled Receptor 35 (GPR35), and Gasdermin B (GSDMB). In some embodiments, methods further comprise administering to the subject an effective amount of an inhibitor of Tumor Necrosis Factor Ligand Superfamily Member 15 (TL1A). In some embodiments, the inhibitor of TL1A is an antibody or antigen-binding fragment antagonist targeting TL1A. In some embodiments, the antibody or antigen-binding fragment targeting TL1A is provided in Table 15.

[0011] Aspects disclosed herein provide methods of treating moderate to severe Crohn's disease in a subject, the method comprising: (a) identifying a subject with Crohn's disease (CD) as being a carrier of a genotype comprising a polymorphism at least one of rs911605 and rs1006026, the genotype associated with a risk that the subject will develop a moderate to severe form of CD comprising obstructive CD; and (b) administering to the subject a therapeutically effective amount of an inhibitor of CD30 ligand activity or expression. In some embodiments, the methods further comprise determining whether the subject has or will develop at least one of a non-response or a loss-of-response to a standard treatment. In some embodiments, the standard treatment is selected from the group consisting of glucocorticosteriods, anti-TNF therapy, anti-a4-b7 therapy (vedolizumab), anti-IL12p40 therapy (ustekinumab), Thalidomide, and Cytoxin. In some embodiments, the polymorphism at rs911605 comprises an “A” allele at nucleobase 501 within rs911605 (SEQ ID NO: 1), and wherein the polymorphism at rs1006026 comprises a “G” allele at nucleobase 501 within rs1006026 (SEQ ID NO: 3). In some embodiments, the genotype comprises the polymorphism at rs911605 and the polymorphism at rs1006026. In some embodiments, the inhibitor of CD30 ligand activity is an antibody or an antigen-binding fragment targeting CD30 ligand or CD30, or a combination thereof. In some embodiments, methods further comprise administering to the subject an additional therapeutic agent. In some embodiments, the additional therapeutic agent is a modulator of an expression of a gene or an expression or an activity of a gene expression product, the gene selected from the group consisting of Mitogen-Activated Protein Kinase Kinase Kinase Kinase 4 (MAP4K4), Prostaglandin E Receptor 4 (PTGER4), interleukin 18 receptor 1 (IL18R1). 6-Phosphofructo-2-Kinase/Fructose-2,6-Biphosphatase 3 (PFKFB3), Interleukin 18 Receptor Accessory Protein (IL18RAP), Adenylate Cyclase 7 (ADCY7), B Lymphoid Tyrosine Kinase (BLK), G Protein-Coupled Receptor 65 (GPR65), Sprouty Related EVH1 Domain Containing 2 (SPRED2), Src Kinase Associated Phosphoprotein 2 (SKAP2), Receptor Interacting Serine/Threonine Kinase 2 (RIPK2), and TNF Ligand Superfamily Member 15 (TNFSF15), Janus Kinase 1 (JAK1) G-protein Coupled Receptor 35 (GPR35), and Gasdermin B (GSDMB). In some embodiments, methods further comprise administering to the subject an effective amount of an inhibitor of Tumor Necrosis Factor Ligand Superfamily Member 15 (TL1A). In some embodiments, the inhibitor of TL1A is an antibody or antigen-binding fragment antagonist targeting TL1A. In some embodiments, the antibody or antigen-binding fragment targeting TL1A is provided in Table 15.

[0012] Aspects disclosed herein provide methods of characterizing an inflammatory disease in a subject, the method comprising: (a) assaying genetic material in a sample obtained from a subject with an inflammatory disease to detect a presence or an absence of a genotype comprising at at least one of rs911605 and a rs1006026; and (b) characterizing the inflammatory disease as a Crohn's disease (CD) provided the presence of the genotype is detected in step (a). In some embodiments, assaying genetic material in a sample of step (a) comprises: (a) amplifying from the genetic material at least 15 nucleobases within SEQ ID NO: 5 or SEQ ID NO: 6, the at least 15 nucleobases comprising a nucleobase at a position indicated by [A/G] in SEQ ID NO: 5 or [A/G] in SEQ ID NO: 6; and (b) hybridizing to the genetic material a nucleic acid comprising a nucleic acid sequence comprising at least one of SEQ ID NO: 5 and SEQ ID NO: 6. In some embodiments, assaying genetic material in a sample of step (a) comprises: (a) amplifying from the genetic material at least 15 nucleobases within SEQ ID NO: 7 or SEQ ID NO: 8, the at least 15 nucleobases comprising a nucleobase at a position indicated by [A/G] in SEQ ID NO: 7 or [A/G] in SEQ ID NO: 8; and (b) hybridizing to the genetic material a nucleic acid comprising a nucleic acid sequence comprising at least one of SEQ ID NO: 7 and SEQ ID NO: 8. In some embodiments, the nucleic acid comprises a detectable molecule. In some embodiments, the methods further comprise administering to the subject an inhibitor of CD30 ligand activity or expression, provided the inflammatory disease is characterized as moderate to severe in step (b). In some embodiments, the inhibitor of CD30 ligand activity is an antibody or an antigen-binding fragment targeting CD30 ligand or CD30, or a combination thereof. In some embodiments, the characterizing the inflammatory disease as CD of step (b) further comprises characterizing the inflammatory disease as refractory to a standard treatment selected from the group consisting of wherein the standard treatment is selected from the group consisting of glucocorticosteriods, anti-TNF therapy, anti-a4-b7 therapy (vedolizumab), anti-IL12p40 therapy (ustekinumab), Thalidomide, and Cytoxin. In some embodiments, the CD is further characterized as obstructive CD. In some embodiments, methods further comprise administering to the subject an additional therapeutic agent. In some embodiments, the additional therapeutic agent is a modulator of an expression of a gene or an expression or an activity of a gene expression product, the gene selected from the group consisting of Mitogen-Activated Protein Kinase Kinase Kinase Kinase 4 (MAP4K4), Prostaglandin E Receptor 4 (PTGER4), interleukin 18 receptor 1 (IL18R1). 6-Phosphofructo-2-Kinase/Fructose-2,6-Biphosphatase 3 (PFKFB3), Interleukin 18 Receptor Accessory Protein (IL18RAP), Adenylate Cyclase 7 (ADCY7), B Lymphoid Tyrosine Kinase (BLK), G Protein-Coupled Receptor 65 (GPR65), Sprouty Related EVH1 Domain Containing 2 (SPRED2), Src Kinase Associated Phosphoprotein 2 (SKAP2), Receptor Interacting Serine/Threonine Kinase 2 (RIPK2), and TNF Ligand Superfamily Member 15 (TNFSF15), Janus Kinase 1 (JAK1) G-protein Coupled Receptor 35 (GPR35), and Gasdermin B (GSDMB). In some embodiments, methods further comprise administering to the subject an effective amount of an inhibitor of Tumor Necrosis Factor Ligand Superfamily Member 15 (TL1A). In some embodiments, the inhibitor of TL1A is an antibody or antigen-binding fragment antagonist targeting TL1A. In some embodiments, the antibody or antigen-binding fragment targeting TL1A is provided in Table 15.

[0013] Use of a compound comprising an inhibitor of CD30 ligand to treat a subject identified as being a carrier of a genotype comprising an “A” allele at nucleoposition 501 within SEQ ID NO: 2, a “G” allele at nucleoposition 501 within SEQ ID NO: 4, or a combination thereof. In some embodiments, the subject is identified as having, or susceptible to developing, at least one of a non-response or a loss-of-response to a standard treatment selected from the group consisting of glucocorticosteriods, anti-TNF therapy, anti-a4-b7 therapy (vedolizumab), anti-IL12p40 therapy (ustekinumab), Thalidomide, and Cytoxin.

[0014] Use of a combination therapy comprising an inhibitor of CD30 ligand and an inhibitor of Tumor Necrosis Factor Ligand Superfamily Member 15 (TL1A) to treat a subject identified as being a carrier of a genotype comprising an “A” allele at nucleoposition 501 within SEQ ID NO: 2, a “G” allele at nucleoposition 501 within SEQ ID NO: 4, or a combination thereof. In some embodiments, the inhibitor of CD30 ligand and the inhibitor of TL1A are administered to the subject separately. In some embodiments, the subject is identified as having, or susceptible to developing, at least one of a non-response or a loss-of-response to a standard treatment selected from the group consisting of glucocorticosteriods, anti-TNF therapy, anti-a4-b7 therapy (vedolizumab), anti-IL12p40 therapy (ustekinumab), Thalidomide, and Cytoxin. In some embodiments, the inhibitor of TL1A is an antibody or antigen-binding fragment targeting TL1A. In some embodiments, the antibody or antigen-binding fragment targeting TL1A is provided in Table 15.

### BRIEF DESCRIPTION OF THE DRAWINGS

[0015] FIG. 1 shows that the risk allele, “A” within rs911605 (P=4.41×10⁻⁴) (rs911605A or rs911605AA) is associated with increased expression of tumor necrosis factor receptor superfamily 8 (TNFSF8) mRNA in the small bowel using cis-expression quantitative trait loci (cis-eQTL), as compared to individuals who do not carry the risk allele (“non-risk, GG”).

[0016] FIG. 2. shows CD30L protein expression is upregulated on T cells and B cells in samples obtained from subjects carrying the rs911605A or rs911605AA risk genotypes, as compared to non-risk (“NR”) individual who does not express the risk genotypes.

[0017] FIG. 3. shows an increase in expression of interferon gamma, (IFN-gamma or IFNg) in samples obtained from subjects, as compared to non-risk (“NR”) individual who does not express the risk genotypes.

[0018] FIG. 4 shows an increase in expression of tumor necrosis factor alpha (TNFa) in samples obtained from subjects, as compared to non-risk (“NR”) individual who does not express the risk genotypes

[0019] FIG. 5 shows an increase in expression of interleukin 6 (IL-6) in samples obtained from subjects, as compared to non-risk (“NR”) individual who does not express the risk genotypes.

[0020] FIG. 6A-6C shows CD30L expression is correlated with levels of soluble CD30 (sCD30) in patient population carrying various genotypes, including rs911605AA and rs1006026 AA/GA/GG genotypes (FIG. 6A), rs911605AA and rs1006026 GA/GG genotypes (FIG. 6B), and rs911605AA and rs1006026 GG genotypes (FIG. 6C).

[0021] FIG. 7A-7C shows risk genotypes rs911605AA and rs1006026 AA/GA/GG (FIG. 7A), rs911605AA and rs1006026 GA/GG (FIG. 7B), and rs911605AA and rs1006026 GG (FIG. 7C), are correlated with levels for sCD30 and the percent of CD30L in B cells.

### DETAILED DESCRIPTION OF THE INVENTION

[0022] The present disclosure provides methods and systems for detecting the presence or absence of a particular genotype in a subject, which in some cases, is useful for selecting subjects for a particular treatment of a certain disease or condition, identifying a risk of developing a clinical or subclinical phenotype, or a combination thereof. In some embodiments, the genotype comprises a polymorphism at rs911605 (SEQ ID NO: 1) and optionally rs1006026 (SEQ ID NO: 3). As an example, the genotype is a haplotype comprising a polymorphism at both rs911605 and rs1006026. In some cases, the presence of the particular genotype indicates that the subject has elevated expression of CD30 ligand (CD30L). In some cases, the presence of the particular genotype indicates that the subject has elevated levels of soluble CD30. In some cases, the presence of the particular genotype indicates that the subject has elevated expression of the tumor necrosis factor (TNF) family cytokine, TL1A (TNFSF15). Accordingly, subjects positive for said genotype may be suitable for treatment with a CD30L inhibitor, such as an anti-CD30L antibody. Subject positive for said genotype may also be suitable for treatment with a TL1A inhibitor. For example, the CD30L inhibitor and the TL1A inhibitor may be useful to treat a disease or condition associated with CD30L/CD30 or TL1A activity, such at least one of an inflammatory disease, fibrostenotic disease, and fibrotic disease. Non-limiting examples of inflammatory diseases include diseases of the gastrointestinal tract, liver, and gallbladder; including Crohn's disease (CD). An exemplary fibrotic disease is primary sclerosing cholangitis (PSC).

[0023] In some embodiments, methods and systems are provided for identifying whether or not a subject has a polymorphism at rs911605 and/or rs1006026. In some cases, the polymorphism comprises an “A” allele at position 501 of rs911605 (SEQ ID NO: 2). In some cases, the polymorphism comprises a “G” allele at position 501 of rs1006026 (SEQ ID NO: 4). Exemplary methods include a hybridization assay that comprises contacting genetic material from the subject with a probe comprising a nucleic acid sequence hybridizable to at least a portion (e.g., at least about 10 nucleobases) of a nucleic acid sequence comprising a polymorphism. As an example, a method comprises contacting the genetic material with a probe comprising at least about 10 contiguous nucleobases of rs911605 (SEQ ID NO: 1 or SEQ ID NO: 2), wherein the probe comprises at least the nucleobase at position 501. As another example, a method comprises contacting the genetic material with a probe comprising at least about 10 contiguous nucleobases of rs1006026 (SEQ ID NO: 3 or SEQ ID NO: 4), wherein the probe comprises at least the nucleobase at position 501. Additional probes include those having a sequence that is a reverse complement to those described herein, e.g., a reverse complement to any of SEQ ID NOS: 1-4. In some cases, a method comprises a multiplex assay comprising contacting the genetic material with two or more probes, e.g., one or more probes specific for a polymorphism at rs911605 and one or more probes specific for a polymorphism at rs1006026. Suitable hybridization assays include quantitative polymerase chain reaction (qPCR). For example, the qPCR is a TaqMan™ assay.

[0024] Further provided are compositions and kits for detecting the presence of a particular genotype or haplotype, e.g., a polymorphism at rs911605 and/or rs1006026. In some cases, the kits comprise regents such as primers and/or probes configured to amplify and/or detect the genotype from a genetic sample of a subject. In some cases, the kits comprise a sample collection device. Some such devices are useful for obtaining a sample comprising genetic material from a subject. An exemplary collection device is a swab. For use in collecting samples, one method involves contacting the swab to the surface of the subject to be tested, for example, the inner check. Another exemplary collection device is a tube for collection of a blood sample from the subject. In some cases the tube comprises an additive for preservation and/or to facilitate analysis. For example, the tube comprises heparin, potassium oxalate, sodium fluoride, ethylenediaminetetraacetic acid (EDTA), sodium citrate, reagents that activate or reduce clotting, reagents that separate serum, or a combination thereof.

[0025] Further provided are CD30L inhibitors and other therapeutic agents, which may be administered to a patient having an inflammatory disease, fibrostenotic disease, and/or fibrotic disease. In some cases the other therapeutic agent may comprise a TL1A inhibitor. A non-limiting example of a CD30L inhibitor is an anti-CD30L antibody, such as the antibodies disclosed elsewhere herein. A non-limiting example of a TL1A inhibitor is an anti-TL1A antibody, such as the antibodies discloses herein. In some embodiments, the patient comprises a genotype disclosed herein, e.g., a polymorphism at rs911605 and/or rs1006026.

### Overview

[0026] Aspects disclosed herein provide genotypes of a subject. The genotypes may be detected in a sample obtained from the subject by analyzing the genetic material in the sample. The genotypes disclosed herein may be associated with a disease or condition, or a subclinical phenotype of a disease or a condition. The genotypes disclosed herein may be associated with an increase or a decrease in an expression of a gene, or gene expression product expressed from the gene. The genotypes may additionally be associated with a presence of other biomarkers, such as serological markers.

[0027] Determining a presence of the genotypes disclosed herein may be useful for at least one of diagnosing, prognosing, monitoring, preventing, and treating a subject with the disease or condition, or subclinical phenotype or symptom thereof. The genotypes disclosed herein may also be useful for identifying subjects that are likely to experience non-response or loss-of-response to a standard treatment, such as a certain first-line therapies (e.g., anti-TNF therapies, steroids, or other immunomodulators). Similarly, the genotypes disclosed herein can be used to identifying subjects that are likely to experience a positive (e.g., therapeutic) response to therapeutic agents or additional therapeutic agents disclosed herein (e.g., anti-TL1A therapy).

### Subject

[0028] The subject disclosed herein can be a mammal, such as for example a mouse, rat, guinea pig, rabbit, non-human primate, or farm animal. In some instances, the subject is human. In some instances, the subject is a patient who is diagnosed with the disease or condition disclosed herein. In some instances, the subject is not diagnosed with the disease or condition. In some instances, the subject is suffering from a symptom related to a disease or condition disclosed herein (e.g., abdominal pain, cramping, diarrhea, rectal bleeding, fever, weight loss, fatigue, loss of appetite, dehydration, and malnutrition, anemia, or ulcers).

In some embodiments, the subject is susceptible to, or is inflicted with, thiopurine toxicity, or a disease caused by thiopurine toxicity (such as pancreatitis or leukopenia). The subject may experience, or is suspected of experiencing, non-response or loss-of-response to a standard treatment (e.g., anti-TNF alpha therapy, anti-a4-b7 therapy (vedolizumab), anti-IL12p40 therapy (ustekinumab), Thalidomide, or Cytoxin).

### Disease or Condition

[0029] The disease or condition disclosed herein is at least one of an inflammatory disease, a fibrostenotic disease, and a fibrotic disease. Non-limiting examples of inflammatory diseases include diseases of the gastrointestinal (GI) tract, liver, gallbladder, and joints. In some cases, the inflammatory disease inflammatory bowel disease (IBD), Crohn's disease (CD), or ulcerative colitis, systemic lupus erythematosus (SLE), or rheumatoid arthritis. A subject may suffer from fibrosis, fibrostenosis, or a fibrotic disease, either isolated or in combination with an inflammatory disease. In some cases, the CD is obstructive CD. The obstructive CD may result from inflammation that has led to the formation of scar tissue in the intestinal wall (fibrostenosis) and/or swelling. In some cases, the CD is characterized by the presence of fibrotic and/or inflammatory strictures. The strictures may be determined by computed tomography enterography (CTE), and magnetic resonance imaging enterography (MRE). In some embodiments, the disease is primary sclerosing cholangitis (PSC). Exemplary methods of diagnosing PSC include magnetic resonance cholangiopancreatography (MRCP), liver function tests, and histology. Liver function tests are valuable in the laboratory workup, and may include measurement of levels of serum alkaline phosphatase, serum aminotransferase, gamma glutamyl transpeptidase, and the presence of hypergammaglobulinemia. The disease or condition may comprise thiopurine toxicity, or a disease caused by thiopurine toxicity (such as pancreatitis or leukopenia). In further embodiments provided, the subject experiences non-response to an induction of a therapy, or a loss-of-response to the therapy after a successful induction of the therapy. Non-limiting examples of standard treatment include glucocorticosteriods, anti-TNF therapy, anti-a4-b7 therapy (vedolizumab), anti-IL12p40 therapy (ustekinumab), Thalidomide, and Cytoxin.

### Genotypes

[0030] Disclosed herein, in some embodiments are genotypes that are detected in a sample obtained from a subject by analyzing the genetic material in the sample. In some instances, the subject may be human. In some embodiments, the genetic material is obtained from a subject having a disease or condition disclosed herein. In some cases, the genetic material is obtained from blood, serum, plasma, sweat, hair, tears, urine, and other techniques known by one of skill in the art. In some cases, the genetic material is obtained for a biopsy, e.g., from the intestinal track of the subject.

[0031] The genotypes of the present disclosure comprise genetic material that is deoxyribonucleic acid (DNA). In some instances, the genotype comprises a denatured DNA molecule or fragment thereof. In some instances, the genotype comprises DNA selected from: genomic DNA, viral DNA, mitochondrial DNA, plasmid DNA, amplified DNA, circular DNA, circulating DNA, cell-free DNA, or exosomal DNA. In some instances, the DNA is single-stranded DNA (ssDNA), double-stranded DNA, denaturing double-stranded DNA, synthetic DNA, and combinations thereof. The circular DNA may be cleaved or fragmented.

[0032] The genotypes disclosed herein comprise at least one polymorphisms at a gene or genetic locus described herein. In some instances, the gene or genetic locus comprises Tumor Necrosis Factor (Ligand) Superfamily, Member 8 (TNFSF8). In some instances, the gene or genetic locus comprises TNF Superfamily Member 15 (TNFSF15). In some instances, the polymorphism is at a genetic locus that is intergenic, spanning both TNFSF8 and TNFSF15. The genotypes disclosed herein are, in some cases, a haplotype. In some instances, the genotype comprises a particular polymorphism, a polymorphism in linkage disequilibrium (LD) therewith, or a combination thereof. In some cases, LD is defined by an r² of at least or about 0.70, 0.75, 0.80, 0.85, 0.90, or 0.1. The genotypes disclosed herein can comprise at least or about 1, 2, 3, 4, 5, 6, 7, 8, 9, 10, 11, 12, 13, 14, 15, 16, 17, 18, 19, 20, 21, 22, 23, 24, 25, 26, 27, 28, 29, 30, or more polymorphisms.

[0033] The polymorphisms described herein can be a single nucleotide polymorphism, or an indel (insertion/deletion). In some instances, the polymorphism is an insertion or a deletion of at least one nucleobase (e.g., an indel). In some instances, the genotype may comprise a copy number variation (CNV), which is a variation in a number of a nucleic acid sequence between individuals in a given population. In some instances, the CNV comprises at least or about two, three, four, five, six, seven, eight, nine, ten, twenty, thirty, forty or fifty nucleic acid molecules. In some instances, the genotype is heterozygous. In some instances, the genotype is homozygous.

[0034] The genotypes presented herein, in some cases, are associated with a presence of a serological marker. A serological marker is a type of biomarker, such as an autoantigen, that represent a serological response to microbial antigens in the body of a subject. Non-limiting examples of serological markers include anti-neutrophil cytoplasmic antibody (ANCA), anti-Saccharomyces cerevisiae antibody (ASCA), anti-flagellin (CBir1) antibody, and E. coli outer membrane porin protein C (OmpC). The serological markers disclosed herein are useful for patient selection for treatment either alone, or in combination with the genotypes disclosed herein. The serological markers disclosed herein are also useful for the diagnosis, prognosis, prevention, treatment, and/or monitoring of the disease or conditions disclosed herein either alone, or in combination with the genotypes disclosed herein.

[0035] In some instances, the genotype comprises one or more polymorphisms at a gene or genetic locus comprising Tumor Necrosis Factor (Ligand) Superfamily, Member 8 (TNFSF8) and/or TNF Superfamily Member 15 (TNFSF15). Disclosed herein, in the following embodiments, are genotypes disclosed herein:
[0036] 1. A genotype comprising at least one polymorphism at a gene or genetic locus.
[0037] 2. The genotype of embodiment 1 comprising a polymorphism provided in Table 1, or a polymorphism in linkage disequilibrium (LD) therewith.
[0038] 3. The genotype of embodiments 1-2 comprising a polymorphism provided in Table 2, or a polymorphism in LD therewith.
[0039] 4. The genotype of embodiments 1-3 comprising a polymorphism provided in Table 3, or a polymorphism in LD therewith.
[0040] 5. The genotype of embodiments 1-4 comprising a polymorphism provided in Table 4, or a polymorphism in LD therewith.
[0041] 6. The genotype of embodiments 1-5 comprising a polymorphism provided in Table 5, or a polymorphism in LD therewith.
[0042] 7. The genotype of embodiments 1-6 comprising a polymorphism provided in Table 6, or a polymorphism in LD therewith.
[0043] 8. The genotype of embodiments 1-7 comprising a polymorphism provided in Table 7, or a polymorphism in LD therewith.
[0044] 9. The genotype of embodiments 1-8 comprising a polymorphism provided in Table 8, or a polymorphism in LD therewith.
[0045] 10. The genotype of embodiments 1-9 comprising a polymorphism provided in Table 9, or a polymorphism in LD therewith.
[0046] 11. The genotype of embodiments 1-10 comprising a polymorphism provided in Table 10, or a polymorphism in LD therewith.
[0047] 12. The genotype of embodiments 1-11 comprising a polymorphism provided in Table 11, or a polymorphism in LD therewith.
[0048] 13. The genotype of embodiments 1-12 comprising a polymorphism provided in Table 12, or a polymorphism in LD therewith.
[0049] 14. The genotype of embodiments 1-13 comprising a polymorphism provided in Table 13, or a polymorphism in LD therewith.
[0050] 15. The genotype of embodiments 1-14 comprising a polymorphism provided in Table 14, or a polymorphism in LD therewith.
[0051] 16. The genotype of embodiments 1-15 comprising a single nucleotide polymorphism (SNP) at rs911605.
[0052] 17. The genotype of embodiment 16, wherein the SNP at rs911605 is provided in SEQ ID NO: 1.
[0053] 18. The genotype of embodiment 16, wherein the SNP at rs911605 comprises an “A” allele at position 501 within SEQ ID NO: 2.
[0054] 19. The genotype of embodiments 16-18 that is heterozygous.
[0055] 20. The genotype of embodiments 16-18 that is homozygous.
[0056] 21. The genotype of embodiments 1-20, comprising a SNP at rs1006026.
[0057] 22. The genotype of embodiment 21, wherein the SNP at rs1006026 is provided in SEQ ID NO: 3.
[0058] 23. The genotype of embodiment 21, wherein the SNP at rs100602 comprises a “G” allele at position 501 within SEQ ID NO: 4.
[0059] 24. The genotype of embodiments 21-23 that is heterozygous.
[0060] 25. The genotype of embodiments 21-23 that is homozygous.

[0061] Aspects disclosed herein provide genotypes that are associated with, and therefore, indicative of, a subject having or being susceptible (e.g., at risk of) to developing a particular disease or condition, or a subclinical phenotype thereof. Table 1 provides exemplary polymorphisms associated with CD. Table 2 provides exemplary polymorphisms associated with UC. Table 3 provides exemplary polymorphisms associated with IBD. Table 4 provides exemplary polymorphisms associated with anti-TNF loss of response. Table 5 provides exemplary polymorphisms associated with primary sclerosing cholangitis (PSC). Table 6 provides exemplary polymorphisms associated with a presence of ASCA. Table 7 provides exemplary polymorphisms associated with a presence of an antigenic response to Cbir1 flagellin.

TABLE 1
Exemplary Polymorphisms Associated with Crohn's Disease

| | | | | Minor | |
|---|---|---|---|---|---|
| | | | | Allele | Odds Ratio |
| rsID | Marker ID | Gene | P Value | (A1) | (OR) |
| rs3181356 | imm_9_116732703 | TNFSF8 | 7.59E−27 | A | 0.127634257 |
| rs13300483 | imm_9_116683183 | TNFSF15, TNFSF8 | 2.51E−25 | A | 0.12110115 |
| rs36118932 | imm_9_116656188 | TNFSF15, TNFSF8 | 2.60E−22 | A | 0.114360729 |
| rs722126 | imm_9_116632599 | TNFSF15, TNFSF8 | 3.16E−22 | C | −0.111625108 |
| rs10982417 | imm_9_116629434 | TNFSF15, TNFSF8 | 1.04E−21 | A | 0.143269521 |
| rs7468800 | imm_9_116631826 | TNFSF15, TNFSF8 | 1.36E−21 | A | 0.144078398 |
| rs7040029 | imm_9_116659035 | TNFSF15, TNFSF8 | 6.42E−21 | A | −0.10768221 |
| rs12238227 | imm_9_116639461 | TNFSF15, TNFSF8 | 9.50E−21 | G | 0.138562685 |
| rs1590256 | imm_9_116633496 | TNFSF15, TNFSF8 | 1.55E−20 | G | 0.137826676 |
| rs1075074 | imm_9_116644067 | TNFSF15, TNFSF8 | 2.56E−20 | G | 0.137110318 |
| rs11554257 | imm_9_116644891 | TNFSF15, TNFSF8 | 3.20E−20 | G | 0.136599802 |
| rs79894446 | imm_9_116642313 | TNFSF15, TNFSF8 | 4.17E−20 | G | 0.136019896 |
| rs10982422 | imm_9_116643604 | TNFSF15, TNFSF8 | 1.02E−19 | G | 0.137892446 |
| rs7866342 | imm_9_116667390 | TNFSF15, TNFSF8 | 8.65E−19 | C | −0.100173651 |
| rs56235203 | imm_9_116642117 | TNFSF15, TNFSF8 | 5.48E−18 | G | 0.129567211 |
| rs10982431 | imm_9_116657387 | TNFSF15, TNFSF8 | 8.00E−17 | A | 0.126908428 |
| rs10982433 | imm_9_116660225 | TNFSF15, TNFSF8 | 1.70E−16 | G | 0.12549274 |
| rs10491581 | imm_9_116649544 | TNFSF15, TNFSF8 | 1.93E−16 | A | 0.1244321 |
| rs2418321 | imm_9_116659868 | TNFSF15, TNFSF8 | 2.00E−16 | A | 0.125155976 |
| rs911605 | imm_9_116694811 | TNFSF8 | 2.00E−16 | G | −0.092651259 |
| rs2145931 | imm_9_116660536 | TNFSF15, TNFSF8 | 2.18E−16 | G | 0.124821487 |
| rs4979464 | imm_9_116641968 | TNFSF15, TNFSF8 | 2.18E−12 | A | −0.113423812 |
| rs10817679 | imm_9_116684461 | TNFSF15, TNFSF8 | 2.96E−11 | G | −0.075090309 |
| rs3181354 | imm_9_116732994 | TNFSF8 | 1.69E−10 | G | −0.075637213 |
| rs77648435 | imm_9_116632040 | TNFSF15, TNFSF8 | 5.29E−10 | A | −0.246629497 |
| rs10982420 | imm_9_116640904 | TNFSF15, TNFSF8 | 7.04E−10 | T | 0.141671941 |
| rs4979474 | imm_9_116735805 | TNFSF8, TNC | 9.07E−10 | A | −0.072804645 |
| rs78044803 | imm_9_116652372 | TNFSF15, TNFSF8 | 1.16E−09 | G | 0.097947954 |
| rs75637575 | imm_9_116678220 | TNFSF15, TNFSF8 | 2.33E−09 | A | 0.095701922 |
| rs2418326 | imm_9_116719295 | TNFSF8 | 2.34E−09 | A | −0.071115395 |
| rs1322063 | imm_9_116625303 | TNFSF15, TNFSF8 | 3.28E−09 | A | −0.09309857 |
| rs2093403 | imm_9_116651734 | TNFSF15, TNFSF8 | 1.27E−08 | G | 0.13347984 |
| rs10982439 | imm_9_116671096 | TNFSF15, TNFSF8 | 1.31E−08 | C | 0.093560592 |
| rs7048073 | imm_9_116669510 | TNFSF15, TNFSF8 | 3.35E−08 | A | −0.063477642 |
| rs10982441 | imm_9_116687420 | TNFSF15, TNFSF8 | 5.89E−08 | A | 0.084213508 |
| rs7874896 | imm_9_116676700 | TNFSF15, TNFSF8 | 1.01E−06 | A | −0.055875108 |
| rs1322055 | imm_9_116709406 | TNFSF8 | 1.33E−06 | G | −0.070949973 |
| rs55768522 | ccc-9-116614041-G-A | TNFSF15, TNFSF8 | 1.90E−06 | A | 0.342392467 |
| rs726657 | imm_9_116736157 | TNFSF8, TNC | 2.03E−06 | A | −0.04971668 |
| rs188254589 | ccc-9-116663100-T-C | TNFSF15, TNFSF8 | 3.49E−06 | G | 0.337693635 |
| rs3181348 | imm_9_116734005 | TNFSF8, TNC | 5.36E−06 | A | −0.047553514 |
| rs76779588 | ccc-9-116686804-C-T | TNFSF15, TNFSF8 | 9.46E−06 | A | 0.298183002 |
| rs1322060 | imm_9_116737481 | TNFSF8, TNC | 9.59E−06 | G | −0.046398668 |
| rs2075533 | imm_9_116733452 | TNFSF8 | 1.00E−05 | A | −0.045830075 |
| rs1322057 | imm_9_116618195 | TNFSF15, TNFSF8 | 1.56E−05 | G | 0.276088282 |
| rs113828061 | imm_9_116702567 | TNFSF8 | 1.86E−05 | G | 0.107734992 |
| rs78309793 | imm_9_116657538 | TNFSF15, TNFSF8 | 2.70E−05 | G | 0.128275942 |
| rs111500603 | imm_9_116724035 | TNFSF8 | 2.95E−05 | G | 0.104772658 |
| rs911603 | imm_9_116737405 | TNFSF8, TNC | 5.87E−05 | A | −0.042084774 |
| rs1006026 | imm_9_116731091 | TNFSF8 | 8.18E−05 | G | −0.040653138 |
| rs61024439 | imm_9_116729369 | TNFSF8 | 1.40E−04 | | −0.111953749 |
| rs72756571 | imm_9_116707709 | TNFSF8 | 1.49E−04 | A | −0.076557349 |
| rs7858603 | imm_9_116703091 | TNFSF8 | 1.72E−04 | C | −0.039227671 |
| rs1322059 | imm_9_116736755 | TNFSF8, TNC | 1.91E−04 | A | −0.039524418 |
| rs4979467 | imm_9_116669864 | TNFSF15, TNFSF8 | 2.47E−04 | G | −0.03779018 |
| rs4979466 | imm_9_116669530 | TNFSF15, TNFSF8 | 2.59E−04 | A | −0.037576522 |
| rs7043505 | imm_9_116668349 | TNFSF15, TNFSF8 | 2.59E−04 | G | −0.037570576 |
| rs3181350 | imm_9_116733515 | TNFSF8 | 3.18E−04 | G | −0.101146647 |
| rs3181353 | imm_9_116733321 | TNFSF8 | 3.18E−04 | G | −0.101462878 |
| rs3181349 | imm_9_116733826 | TNFSF8, TNC | 3.18E−04 | G | −0.101484975 |
| rs7854103 | imm_9_116729659 | TNFSF8 | 4.14E−04 | G | −0.099646548 |
| rs7028891 | imm_9_116684836 | TNFSF15, TNFSF8 | 4.18E−04 | A | −0.036313507 |
| rs1108983 | imm_9_116694988 | TNFSF8 | 4.68E−04 | G | −0.09983025 |
| rs10982456 | imm_9_116730579 | TNFSF8 | 4.96E−04 | G | −0.035911392 |
| rs3181359 | imm_9_116731479 | TNFSF8 | 5.11E−04 | A | −0.09768294 |
| rs10982448 | imm_9_116712065 | TNFSF8 | 5.57E−04 | G | −0.097164171 |
| rs10817681 | imm_9_116714071 | TNFSF8 | 6.37E−04 | G | −0.096062622 |
| rs2181033 | imm_9_116737652 | TNFSF8, TNC | 6.40E−04 | G | −0.036268656 |
| rs1407309 | imm_9_116691601 | TNFSF15, TNFSF8 | 8.42E−04 | A | −0.034837869 |
| rs7028089 | imm_9_116717646 | TNFSF8 | 8.88E−04 | A | −0.0934016 |
| rs10982443 | imm_9_116698611 | TNFSF8 | 9.68E−04 | A | −0.09592099 |
| rs6478117 | imm_9_116701965 | TNFSF8 | 1.11E−03 | G | −0.033637202 |
| rs4978611 | imm_9_116717126 | TNFSF8 | 1.17E−03 | C | −0.033462319 |
| rs12352646 | imm_9_116716339 | TNFSF8 | 1.24E−03 | G | −0.033286377 |
| rs3789879 | imm_9_116718057 | TNFSF8 | 1.30E−03 | G | −0.033147358 |
| rs3181372 | imm_9_116705256 | TNFSF8 | 1.31E−03 | G | −0.033040574 |
| rs10817682 | imm_9_116716135 | TNFSF8 | 1.43E−03 | G | −0.032875621 |
| rs1322056 | imm_9_116712581 | TNFSF8 | 1.46E−03 | G | −0.03279674 |
| rs2974 | imm_9_116703993 | TNFSF8 | 1.49E−03 | G | −0.032778163 |
| rs3181197 | imm_9_116707592 | TNFSF8 | 1.56E−03 | G | −0.032616047 |
| rs3181200 | imm_9_116703705 | TNFSF8 | 1.63E−03 | A | −0.032517084 |
| rs2295800 | imm_9_116704032 | TNFSF8 | 1.64E−03 | G | −0.032505519 |
| rs7030090 | imm_9_116702551 | TNFSF8 | 1.65E−03 | A | −0.032464894 |
| rs12347977 | imm_9_116716651 | TNFSF8 | 1.65E−03 | A | −0.032432508 |
| rs12338765 | imm_9_116716654 | TNFSF8 | 1.74E−03 | C | −0.032273895 |
| rs1322054 | imm_9_116709120 | TNFSF8 | 1.76E−03 | G | −0.032245252 |
| rs3181202 | imm_9_116703371 | TNFSF8 | 1.76E−03 | G | −0.032265553 |
| rs3181367 | imm_9_116706499 | TNFSF8 | 1.82E−03 | A | −0.032136873 |
| rs1126711 | imm_9_116705200 | TNFSF8 | 2.10E−03 | G | −0.031701159 |
| rs1322067 | imm_9_116700754 | TNFSF8 | 2.42E−03 | G | −0.031380906 |
| rs4979465 | imm_9_116647990 | TNFSF15, TNFSF8 | 2.48E−03 | G | −0.052829443 |
| rs3181192 | imm_9_116734915 | TNFSF8, TNC | 2.79E−03 | G | −0.089502633 |
| rs10124990 | imm_9_116737111 | TNFSF8, TNC | 3.14E−03 | G | −0.08887894 |
| rs4978612 | imm_9_116731185 | TNFSF8 | 3.34E−03 | A | −0.076419892 |
| rs2181035 | imm_9_116739156 | TNFSF8, TNC | 3.43E−03 | C | 0.054042281 |
| rs10982445 | imm_9_116699512 | TNFSF8 | 4.72E−03 | G | −0.030273569 |
| rs4979469 | imm_9_116680242 | TNFSF15, TNFSF8 | 7.39E−03 | G | −0.028007015 |
| rs7863183 | imm_9_116682239 | TNFSF15, TNFSF8 | 7.49E−03 | A | −0.027845927 |
| rs1006027 | imm_9_116731134 | TNFSF8 | 9.07E−03 | G | −0.027261872 |
| rs4262377 | imm_9_116629395 | TNFSF15, TNFSF8 | 3.04E−03 | A | 1.177 |

TABLE 2
Exemplary Polymorphisms Associated with Ulcerative Colitis

| | | | | Minor | |
|---|---|---|---|---|---|
| | | | | Allele | Odds Ratio |
| rsID | Marker ID | Gene | P Value | (A1) | (OR) |
| rs722126 | imm_9_116632599 | TNFSF15, TNFSF8 | 6.28E−25 | C | −0.124288852 |
| rs7040029 | imm_9_116659035 | TNFSF15, TNFSF8 | 3.13E−24 | A | −0.121677726 |
| rs7866342 | imm_9_116667390 | TNFSF15, TNFSF8 | 3.51E−23 | C | −0.117434873 |
| rs911605 | imm_9_116694811 | TNFSF8 | 1.08E−21 | G | −0.112633828 |
| rs10817679 | imm_9_116684461 | TNFSF15, TNFSF8 | 4.33E−19 | G | −0.104920168 |
| rs10982422 | imm_9_116643604 | TNFSF15, TNFSF8 | 1.07E−12 | G | 0.112703738 |
| rs12238227 | imm_9_116639461 | TNFSF15, TNFSF8 | 1.54E−12 | G | 0.110055694 |
| rs10982417 | imm_9_116629434 | TNFSF15, TNFSF8 | 1.55E−12 | A | 0.111039743 |
| rs11554257 | imm_9_116644891 | TNFSF15, TNFSF8 | 2.32E−12 | G | 0.10911671 |
| rs1075074 | imm_9_116644067 | TNFSF15, TNFSF8 | 3.56E−12 | G | 0.10834721 |
| rs1590256 | imm_9_116633496 | TNFSF15, TNFSF8 | 6.43E−12 | G | 0.107171668 |
| rs79894446 | imm_9_116642313 | TNFSF15, TNFSF8 | 8.16E−12 | G | 0.106433072 |
| rs56235203 | imm_9_116642117 | TNFSF15, TNFSF8 | 9.36E−12 | G | 0.106734123 |
| rs4979464 | imm_9_116641968 | TNFSF15, TNFSF8 | 2.29E−11 | A | −0.109478698 |
| rs7468800 | imm_9_116631826 | TNFSF15, TNFSF8 | 2.31E−11 | A | 0.106186005 |
| rs10982431 | imm_9_116657387 | TNFSF15, TNFSF8 | 2.86E−11 | A | 0.106239658 |
| rs2418321 | imm_9_116659868 | TNFSF15, TNFSF8 | 2.91E−11 | A | 0.106149421 |
| rs10982433 | imm_9_116660225 | TNFSF15, TNFSF8 | 2.97E−11 | G | 0.1061237 |
| rs10491581 | imm_9_116649544 | TNFSF15, TNFSF8 | 5.02E−11 | A | 0.104199308 |
| rs2145931 | imm_9_116660536 | TNFSF15, TNFSF8 | 5.25E−11 | G | 0.104579186 |
| rs1322055 | imm_9_116709406 | TNFSF8 | 8.58E−09 | G | −0.089451367 |
| rs78044803 | imm_9_116652372 | TNFSF15, TNFSF8 | 2.09E−08 | G | 0.093904306 |
| rs10982439 | imm_9_116671096 | TNFSF15, TNFSF8 | 2.25E−08 | C | 0.094938811 |
| rs1322063 | imm_9_116625303 | TNFSF15, TNFSF8 | 2.41E−08 | A | −0.092480947 |
| rs3181370 | imm_9_116705573 | TNFSF8 | 5.87E−08 | G | 0.059022291 |
| rs75637575 | imm_9_116678220 | TNFSF15, TNFSF8 | 6.22E−08 | A | 0.090274047 |
| rs3181368 | imm_9_116705752 | TNFSF8 | 6.26E−08 | T | 0.059078508 |
| rs3181363 | imm_9_116707063 | TNFSF8 | 6.98E−08 | A | 0.058403899 |
| rs7036962 | imm_9_116726972 | TNFSF8 | 9.65E−08 | A | 0.057826974 |
| rs10982450 | imm_9_116721691 | TNFSF8 | 1.06E−07 | A | 0.057594863 |
| rs3181195 | imm_9_116707963 | TNFSF8 | 1.11E−07 | A | 0.057487215 |
| rs10982449 | imm_9_116716362 | TNFSF8 | 1.17E−07 | G | 0.05738555 |
| rs10982454 | imm_9_116726668 | TNFSF8 | 1.31E−07 | A | 0.057186459 |
| rs3181366 | imm_9_116706597 | TNFSF8 | 1.34E−07 | A | 0.057286573 |
| rs7037640 | imm_9_116716752 | TNFSF8 | 1.37E−07 | C | 0.05690751 |
| rs1322058 | imm_9_116724368 | TNFSF8 | 1.48E−07 | A | 0.056938713 |
| rs2208640 | imm_9_116715275 | TNFSF8 | 1.57E−07 | G | 0.056806226 |
| rs10982441 | imm_9_116687420 | TNFSF15, TNFSF8 | 2.05E−07 | A | 0.084120138 |
| rs927373 | imm_9_116715634 | TNFSF8 | 2.41E−07 | A | 0.056233529 |
| rs1006027 | imm_9_116731134 | TNFSF8 | 2.53E−07 | G | 0.05588679 |
| rs10982451 | imm_9_116722313 | TNFSF8 | 2.67E−07 | A | 0.05575479 |
| rs1006025 | imm_9_116731022 | TNFSF8 | 2.90E−07 | A | 0.055607947 |
| rs4979467 | imm_9_116669864 | TNFSF15, TNFSF8 | 5.40E−07 | G | −0.053862029 |
| rs4979466 | imm_9_116669530 | TNFSF15, TNFSF8 | 6.69E−07 | A | −0.053420913 |
| rs7043505 | imm_9_116668349 | TNFSF15, TNFSF8 | 7.36E−07 | G | −0.053219791 |
| rs10817684 | imm_9_116729005 | TNFSF8 | 1.03E−06 | G | 0.053608161 |
| rs4979469 | imm_9_116680242 | TNFSF15, TNFSF8 | 1.08E−06 | G | −0.053410912 |
| rs2181033 | imm_9_116737652 | TNFSF8, TNC | 1.13E−06 | G | 0.05381049 |
| rs7028891 | imm_9_116684836 | TNFSF15, TNFSF8 | 1.25E−06 | A | −0.052006895 |
| rs1126711 | imm_9_116705200 | TNFSF8 | 1.88E−06 | G | 0.050893813 |
| rs12338765 | imm_9_116716654 | TNFSF8 | 1.97E−06 | C | 0.050968539 |
| rs1322054 | imm_9_116709120 | TNFSF8 | 2.05E−06 | G | 0.050887522 |
| rs3181367 | imm_9_116706499 | TNFSF8 | 2.13E−06 | A | 0.050787131 |
| rs12347977 | imm_9_116716651 | TNFSF8 | 2.29E−06 | A | 0.050639613 |
| rs3181197 | imm_9_116707592 | TNFSF8 | 2.30E−06 | G | 0.050629237 |
| rs3789879 | imm_9_116718057 | TNFSF8 | 2.43E−06 | G | 0.050508536 |
| rs10817682 | imm_9_116716135 | TNFSF8 | 2.45E−06 | G | 0.050491689 |
| rs3181372 | imm_9_116705256 | TNFSF8 | 2.48E−06 | G | 0.05030607 |
| rs1322056 | imm_9_116712581 | TNFSF8 | 2.48E−06 | G | 0.050468509 |
| rs7863183 | imm_9_116682239 | TNFSF15, TNFSF8 | 2.95E−06 | A | −0.050783279 |
| rs4978611 | imm_9_116717126 | TNFSF8 | 3.17E−06 | C | 0.049931768 |
| rs12352646 | imm_9_116716339 | TNFSF8 | 3.60E−06 | G | 0.049647868 |
| rs10982445 | imm_9_116699512 | TNFSF8 | 4.37E−06 | G | 0.050226104 |
| rs10982456 | imm_9_116730579 | TNFSF8 | 4.56E−06 | G | 0.049123235 |
| rs1322067 | imm_9_116700754 | TNFSF8 | 4.96E−06 | G | 0.048951815 |
| rs2295800 | imm_9_116704032 | TNFSF8 | 6.85E−06 | G | 0.048236814 |
| rs1322059 | imm_9_116736755 | TNFSF8, TNC | 8.11E−06 | A | 0.049064536 |
| rs1006026 | imm_9_116731091 | TNFSF8 | 8.17E−06 | G | 0.047839556 |
| rs1407309 | imm_9_116691601 | TNFSF15, TNFSF8 | 8.22E−06 | A | 0.048046906 |
| rs911603 | imm_9_116737405 | TNFSF8, TNC | 8.70E−06 | A | 0.048406272 |
| rs6478117 | imm_9_116701965 | TNFSF8 | 9.35E−06 | G | 0.047474288 |
| rs3181202 | imm_9_116703371 | TNFSF8 | 9.67E−06 | G | 0.047414067 |
| rs7030090 | imm_9_116702551 | TNFSF8 | 1.05E−05 | A | 0.047227175 |
| rs2974 | imm_9_116703993 | TNFSF8 | 1.06E−05 | G | 0.047199604 |
| rs10982420 | imm_9_116640904 | TNFSF15, TNFSF8 | 1.08E−05 | T | 0.101283401 |
| rs3181200 | imm_9_116703705 | TNFSF8 | 1.14E−05 | A | 0.047041777 |
| rs1322060 | imm_9_116737481 | TNFSF8, TNC | 2.34E−05 | G | 0.046206866 |
| rs2075533 | imm_9_116733452 | TNFSF8 | 4.94E−05 | A | 0.043859332 |
| rs7858603 | imm_9_116703091 | TNFSF8 | 5.53E−05 | C | 0.043470883 |
| rs726657 | imm_9_116736157 | TNFSF8, TNC | 6.27E−05 | A | 0.043538058 |
| rs3181348 | imm_9_116734005 | TNFSF8, TNC | 8.14E−05 | A | 0.042756582 |
| rs2093403 | imm_9_116651734 | TNFSF15, TNFSF8 | 8.25E−05 | G | 0.093001054 |
| rs3181371 | imm_9_116705391 | TNFSF8 | 1.19E−04 | C | −0.060937815 |
| rs78309793 | imm_9_116657538 | TNFSF15, TNFSF8 | 2.96E−04 | G | 0.115368127 |
| rs13300483 | imm_9_116683183 | TNFSF15, TNFSF8 | 3.31E−04 | A | 0.044227549 |
| rs3181356 | imm_9_116732703 | TNFSF8 | 5.14E−04 | A | 0.043769254 |
| rs2181035 | imm_9_116739156 | TNFSF8, TNC | 8.84E−04 | C | 0.065107027 |
| rs75801708 | imm_9_116727818 | TNFSF8 | 9.65E−04 | C | −0.098704195 |
| rs36118932 | imm_9_116656188 | TNFSF15, TNFSF8 | 1.11E−03 | A | 0.040562011 |
| rs1012823 | rs1012823 | TNFSF8, TNC | 1.98E−03 | A | −0.047452096 |
| rs873212 | rs873212 | TNFSF8, TNC | 3.02E−03 | G | −0.044799266 |
| rs3181374 | imm_9_116705008 | TNFSF8 | 5.31E−03 | G | 0.043314289 |

TABLE 3
Exemplary Polymorphisms Associated with Inflammatory Bowel Disease

| | | | | Minor | |
|---|---|---|---|---|---|
| | | | | Allele | Odds Ratio |
| rsID | Marker ID | Gene | P Value | (A1) | (OR) |
| rs722126 | imm_9_116632599 | TNFSF15, TNFSF8 | 1.57E−37 | C | −0.119719764 |
| rs7040029 | imm_9_116659035 | TNFSF15, TNFSF8 | 1.04E−35 | A | −0.116554847 |
| rs7866342 | imm_9_116667390 | TNFSF15, TNFSF8 | 1.76E−33 | C | −0.110866084 |
| rs911605 | imm_9_116694811 | TNFSF8 | 5.65E−30 | G | −0.104314245 |
| rs10982417 | imm_9_116629434 | TNFSF15, TNFSF8 | 1.29E−26 | A | 0.130969529 |
| rs12238227 | imm_9_116639461 | TNFSF15, TNFSF8 | 7.41E−26 | G | 0.127644848 |
| rs11554257 | imm_9_116644891 | TNFSF15, TNFSF8 | 3.09E−25 | G | 0.125958552 |
| rs7468800 | imm_9_116631826 | TNFSF15, TNFSF8 | 3.31E−25 | A | 0.128474721 |
| rs1590256 | imm_9_116633496 | TNFSF15, TNFSF8 | 3.71E−25 | G | 0.126145147 |
| rs1075074 | imm_9_116644067 | TNFSF15, TNFSF8 | 4.44E−25 | G | 0.126009952 |
| rs10982422 | imm_9_116643604 | TNFSF15, TNFSF8 | 7.04E−25 | G | 0.12768232 |
| rs79894446 | imm_9_116642313 | TNFSF15, TNFSF8 | 1.38E−24 | G | 0.124301292 |
| rs10817679 | imm_9_116684461 | TNFSF15, TNFSF8 | 8.03E−24 | G | −0.092524278 |
| rs56235203 | imm_9_116642117 | TNFSF15, TNFSF8 | 8.86E−23 | G | 0.120769421 |
| rs10982431 | imm_9_116657387 | TNFSF15, TNFSF8 | 1.33E−21 | A | 0.119254366 |
| rs10982433 | imm_9_116660225 | TNFSF15, TNFSF8 | 2.39E−21 | G | 0.118149495 |
| rs10491581 | imm_9_116649544 | TNFSF15, TNFSF8 | 3.17E−21 | A | 0.116967553 |
| rs2418321 | imm_9_116659868 | TNFSF15, TNFSF8 | 3.23E−21 | A | 0.118006471 |
| rs2145931 | imm_9_116660536 | TNFSF15, TNFSF8 | 3.97E−21 | G | 0.117200813 |
| rs4979464 | imm_9_116641968 | TNFSF15, TNFSF8 | 1.15E−19 | A | −0.114761387 |
| rs3181356 | imm_9_116732703 | TNFSF8 | 4.62E−19 | A | 0.087100845 |
| rs13300483 | imm_9_116683183 | TNFSF15, TNFSF8 | 2.97E−18 | A | 0.083307356 |
| rs36118932 | imm_9_116656188 | TNFSF15, TNFSF8 | 4.28E−16 | A | 0.078574343 |
| rs78044803 | imm_9_116652372 | TNFSF15, TNFSF8 | 4.38E−14 | G | 0.099133994 |
| rs1322063 | imm_9_116625303 | TNFSF15, TNFSF8 | 7.77E−14 | A | −0.096179563 |
| rs75637575 | imm_9_116678220 | TNFSF15, TNFSF8 | 1.39E−13 | A | 0.096780433 |
| rs10982439 | imm_9_116671096 | TNFSF15, TNFSF8 | 1.80E−13 | C | 0.09853306 |
| rs10982420 | imm_9_116640904 | TNFSF15, TNFSF8 | 2.42E−12 | T | 0.125825417 |
| rs10982441 | imm_9_116687420 | TNFSF15, TNFSF8 | 4.12E−12 | A | 0.087966244 |
| rs1322055 | imm_9_116709406 | TNFSF8 | 5.44E−12 | G | −0.082925078 |
| rs2093403 | imm_9_116651734 | TNFSF15, TNFSF8 | 1.80E−10 | G | 0.116767675 |
| rs4979467 | imm_9_116669864 | TNFSF15, TNFSF8 | 3.58E−08 | G | −0.046250219 |
| rs4979466 | imm_9_116669530 | TNFSF15, TNFSF8 | 4.23E−08 | A | −0.046002848 |
| rs7043505 | imm_9_116668349 | TNFSF15, TNFSF8 | 4.78E−08 | G | −0.045821602 |
| rs7028891 | imm_9_116684836 | TNFSF15, TNFSF8 | 1.31E−07 | A | −0.044213844 |
| rs78309793 | imm_9_116657538 | TNFSF15, TNFSF8 | 3.07E−07 | G | 0.12769485 |
| rs4979469 | imm_9_116680242 | TNFSF15, TNFSF8 | 2.29E−06 | G | −0.040362537 |
| rs7863183 | imm_9_116682239 | TNFSF15, TNFSF8 | 3.34E−06 | A | −0.039324521 |
| rs77648435 | imm_9_116632040 | TNFSF15, TNFSF8 | 1.19E−05 | A | −0.136437533 |
| rs188254589 | ccc-9-116663100-T-C | TNFSF15, TNFSF8 | 2.06E−05 | G | 0.267708154 |
| rs2181035 | imm_9_116739156 | TNFSF8, TNC | 4.60E−05 | C | 0.062133802 |
| rs113828061 | imm_9_116702567 | TNFSF8 | 6.79E−05 | G | 0.082230618 |
| rs111500603 | imm_9_116724035 | TNFSF8 | 9.74E−05 | G | 0.080126747 |
| rs61024439 | imm_9_116729369 | TNFSF8 | 1.75E−04 | | −0.088365619 |
| rs55768522 | ccc-9-116614041-G-A | TNFSF15, TNFSF8 | 5.14E−04 | A | 0.205902611 |
| rs3181350 | imm_9_116733515 | TNFSF8 | 8.08E−04 | G | −0.075753825 |
| rs3181349 | imm_9_116733826 | TNFSF8, TNC | 8.41E−04 | G | −0.075871707 |
| rs7854103 | imm_9_116729659 | TNFSF8 | 1.05E−03 | G | −0.074360242 |
| rs7028089 | imm_9_116717646 | TNFSF8 | 1.05E−03 | A | −0.074195743 |
| rs3181353 | imm_9_116733321 | TNFSF8 | 1.19E−03 | G | −0.073433529 |
| rs10982448 | imm_9_116712065 | TNFSF8 | 1.26E−03 | G | −0.073110217 |
| rs3181359 | imm_9_116731479 | TNFSF8 | 1.33E−03 | A | −0.072696701 |
| rs10817681 | imm_9_116714071 | TNFSF8 | 1.33E−03 | G | −0.072723239 |
| rs1322057 | imm_9_116618195 | TNFSF15, TNFSF8 | 1.93E−03 | G | 0.165462824 |
| rs75801708 | imm_9_116727818 | TNFSF8 | 1.94E−03 | C | −0.071444722 |
| rs1108983 | imm_9_116694988 | TNFSF8 | 2.25E−03 | G | −0.070029514 |
| rs10982443 | imm_9_116698611 | TNFSF8 | 2.79E−03 | A | −0.06989849 |
| rs3181354 | imm_9_116732994 | TNFSF8 | 2.80E−03 | G | −0.028629367 |
| rs4979474 | imm_9_116735805 | TNFSF8, TNC | 3.90E−03 | A | −0.02777651 |
| rs4978612 | imm_9_116731185 | TNFSF8 | 4.02E−03 | A | −0.060449565 |
| rs72756571 | imm_9_116707709 | TNFSF8 | 4.80E−03 | A | −0.046369299 |
| rs76779588 | ccc-9-116686804-C-T | TNFSF15, TNFSF8 | 5.18E−03 | A | 0.158651377 |
| rs3181192 | imm_9_116734915 | TNFSF8, TNC | 7.07E−03 | G | −0.064929665 |
| rs2418326 | imm_9_116719295 | TNFSF8 | 7.19E−03 | A | −0.025883892 |
| rs10124990 | imm_9_116737111 | TNFSF8, TNC | 7.83E−03 | G | −0.064440818 |
| rs1853187 | imm_9_116636173 | TNFSF15, TNFSF8 | 8.49E−03 | C | 0.9114 |

TABLE 4
Exemplary Polymorphisms Associated with Anti-TNF Loss-of-Response

| | | | | | Minor | Odds |
|---|---|---|---|---|---|---|
| | | | | | Allele | Ratio |
| rsID | Marker | Population | Gene | p_value | (A1) | (OR) |
| rs113452999 | ccc-9- | CD | TNFSF8 | 1.31E−03 | C | 3.21321 |
| | 116715322-T-G | | | | | |
| rs3181347 | imm_9_116734138 | CD | TNFSF8, | 1.31E−03 | A | 3.21321 |
| | | | TNC | | | |
| rs56283201 | ccc-9- | CD | TNFSF15, | 4.19E−03 | C | 2.86355 |
| | 116619480-G-C | | TNFSF8 | | | |
| rs111801762 | ccc-9- | CD | TNFSF15, | 4.19E−03 | A | 2.86355 |
| | 116621176-C-T | | TNFSF8 | | | |
| rs3181362 | imm_9_116707264 | UC | TNFSF8 | 7.90E−03 | G | 2.65631 |
| rs3181194 | imm_9_116708182 | UC | TNFSF8 | 7.90E−03 | A | 2.65631 |
| rs3789882 | imm_9_116709520 | UC | TNFSF8 | 7.90E−03 | T | 2.65631 |
| rs7868670 | imm_9_116721173 | UC | TNFSF8 | 7.90E−03 | A | 2.65631 |
| rs4978612 | imm_9_116731185 | UC | TNFSF8 | 7.90E−03 | A | 2.65631 |
| rs3181357 | imm_9_116732165 | UC | TNFSF8 | 7.90E−03 | A | 2.65631 |
| rs10982448 | imm_9_116712065 | UC | TNFSF8 | 7.94E−03 | G | 2.65448 |
| rs10817681 | imm_9_116714071 | UC | TNFSF8 | 7.94E−03 | G | 2.65448 |
| rs7854103 | imm_9_116729659 | UC | TNFSF8 | 7.94E−03 | G | 2.65448 |
| rs3181359 | imm_9_116731479 | UC | TNFSF8 | 7.94E−03 | A | 2.65448 |
| rs3181350 | imm_9_116733515 | UC | TNFSF8 | 7.94E−03 | G | 2.65448 |
| rs3181349 | imm_9_116733826 | UC | TNFSF8, | 7.94E−03 | G | 2.65448 |
| | | | TNC | | | |

TABLE 5
Exemplary Polymorphisms Associated with Primary Sclerosing Cholangitis (PSC)

| | | | | P | Minor | Odds Ratio |
|---|---|---|---|---|---|---|
| rsID | Marker | Population | Gene | Value | Allele (A1) | (OR) |
| rs10982441 | imm_9_116687420 | Ulcerative | TNFSF15, | 8.08E−03 | A | 4.136 |
| | | Colitis | TNFSF8 | | | |
| rs5003740 | imm_9_116700422 | Ulcerative | TNFSF8 | 9.40E−03 | C | 3.041 |
| | | Colitis | | | | |

TABLE 6
Exemplary Polymorphisms Associated with a Presence of ASCA

| | | | | | Minor | Odds |
|---|---|---|---|---|---|---|
| | | | | | Allele | Ratio |
| rsID | Marker | Population | Gene | P Value | (A1) | (OR) |
| rs182685517 | ccc-9- | UC | TNFSF8 | 1.29E−03 | A | 10.3 |
| | 116714799- | | | | | |
| | C-A | | | | | |

TABLE 7
Exemplary Polymorphisms Associated with a Presence of Cbirl Antigenic Response

| | | | | | Minor | Odds |
|---|---|---|---|---|---|---|
| | | | | | Allele | Ratio |
| rsID | Marker | Population | Gene | P Value | (A1) | (OR) |
| rs139709462 | ccc-9- | UC | TNFSF15, | 3.82E−03 | A | 4.766 |
| | 116687002- | | TNFSF8 | | | |
| | G-A | | | | | |

[0062] In one aspect, genotypes are presented herein which are associated with, and therefore, indicative of, a subject having or developing a particular subclinical phenotype of a disease or condition. A subclinical phenotype may be a specific phenotype related to a disease or condition, or metric to measure disease progression that is characteristic of severe or unusual forms of disease. In some instances, the subclinical phenotype is diagnosable. In some instances, the subclinical phenotype is not diagnosable. Non-limiting examples of IBD subclinical phenotypes include, but are not limited to, non-stricturing disease, stricturing disease, stricturing and penetrating disease, perianal Crohn's disease (pCD), defects in Paneth cells, PSC, and development of blood clots (e.g. thrombus). Time to a first surgery, and time to second surgery, are subclinical phenotypes used to identify subjects at risk for severe forms of disease. In the context of inflammatory bowel disease, a time to first surgery may be a time from a symptom of the inflammatory bowel disease to a surgery. The time to first surgery may be a time from first diagnosis of the IBD to a time of a first surgery. The time to second surgery may be a time from a first surgery to the time of a second surgery. The first and/or second surgery may comprise surgery on at least a portion of the gastrointestinal tract of the subject. Non-limiting surgeries include an intestinal resection, colectomy, perianal surgery, and stricturoplasty. The symptom may be a symptom described herein. The portion of the gastrointestinal tract may be selected from the anus, the colon, the large intestine, the small intestine, the stomach, and the esophagus. Table 8 provides exemplary polymorphisms associated with a time to first surgery. Table 9 provides exemplary polymorphisms associated with a time to second surgery. Table 10 provides exemplary polymorphisms associated with various Paneth cell phenotypes. Table 11 provides exemplary SNPs associated with Thrombis development. Table 12 provides exemplary polymorphisms associated with either non-stricturing and non-penetrating disease, or stricturing and penetrating disease in various parts of the small intestine.

TABLE 8
Exemplary Polymorphisms Associated with a Time to First Surgery

| | | | | | Minor Allele | Odds Ratio |
|---|---|---|---|---|---|---|
| rsID | Marker | Population | Gene | P Value | (A1) | (OR) |
| rs77351417 | imm_9_116730128 | CD | TNFSF8 | 4.05E−03 | G | 0.77213 |

TABLE 9
Exemplary Polymorphisms Associated with a Time to Second Surgery

| | | | | | Minor | Odds |
|---|---|---|---|---|---|---|
| | | | | | Allele | Ratio |
| rsID | Marker | Population | Gene | P Value | (A1) | (OR) |
| rs1322055 | imm_9_116709406 | CD | TNFSF8 | 1.57E−03 | G | 1.58918 |
| rs911605 | imm_9_116694811 | CD | TNFSF8 | 5.02E−03 | G | 1.40235 |
| rs7040029 | imm_9_116659035 | CD | TNFSF15, | 7.09E−03 | A | 1.39763 |
| | | | TNFSF8 | | | |
| rs1322063 | imm_9_116625303 | CD | TNFSF15, | 7.23E−03 | A | 1.50433 |
| | | | TNFSF8 | | | |
| rs7866342 | imm_9_116667390 | CD | TNFSF15, | 8.65E−03 | C | 1.39205 |
| | | | TNFSF8 | | | |
| rs10817679 | imm_9_116684461 | CD | TNFSF15, | 8.78E−03 | G | 1.38166 |
| | | | TNFSF8 | | | |
| rs722126 | imm_9_116632599 | CD | TNFSF15, | 8.99E−03 | C | 1.38456 |
| | | | TNFSF8 | | | |

TABLE 10
Exemplary Polymorphisms Associated with Various Paneth Cell Defects

| | | | | | | Minor | Odds |
|---|---|---|---|---|---|---|---|
| | | | | | P | Allele | Ratio |
| rsID | Marker | Population | Gene | Phenotype | value | (A1) | (OR) |
| rs145483345 | ccc-9-116723948- | CD | TNFSF8 | Paneth-DO | 1.95E−03 | A | −36.99 |
| | G-A | | | phenotype | | | |
| rs146284283 | ccc-9-116626832- | CD | TNFSF15, | Paneth-DO | 6.07E−03 | A | −23.46 |
| | G-T | | TNFSF8 | phenotype | | | |
| rs145483345 | ccc-9-116723948- | CD | TNFSF8 | Paneth-D1234 | 1.87E−03 | A | 37.17 |
| | G-A | | | phenotype | | | |
| rs146284283 | ccc-9-116626832- | CD | TNFSF15, | Paneth-D1234 | 5.95E−03 | A | 23.53 |
| | G-T | | TNFSF8 | phenotype | | | |
| rs145483345 | ccc-9-116723948- | CD | TNFSF8 | Paneth-D2 | 3.09E−07 | A | 37.19 |
| | G-A | | | phenotype | | | |
| rs55768522 | ccc-9-116614041- | CD | TNFSF15, | Paneth-D2 | 2.03E−04 | A | 11.26 |
| | G-A | | TNFSF8 | phenotype | | | |
| rs1322057 | imm_9_116618195 | CD | TNFSF15, | Paneth-D2 | 7.45E−04 | G | 8.884 |
| | | | TNFSF8 | phenotype | | | |
| rs146284283 | ccc-9-116626832- | CD | TNFSF15, | Paneth-D3 | 7.21E−05 | A | 10.97 |
| | G-T | | TNFSF8 | phenotype | | | |
| rs113828061 | imm_9_116702567 | CD | TNFSF8 | Paneth-D5 | 4.74E−03 | G | 0.5058 |
| | | | | phenotype | | | |
| rs111500603 | imm_9_116724035 | CD | TNFSF8 | Paneth-D5 | 4.74E−03 | G | 0.5058 |
| | | | | phenotype | | | |

TABLE 11
Exemplary Polymorphisms Associated with Thrombis Development

| | | | | | Minor Allele | Odds Ratio |
|---|---|---|---|---|---|---|
| rsID | Marker | Population | Gene | P Value | (A1) | (OR) |
| rs4979474 | imm_9_116735805 | UC | TNFSF8, | 8.81E−03 | A | 13.27 |
| | | | TNC | | | |
| rs726658 | imm_9_116736087 | UC | TNFSF8, | 8.81E−03 | C | 13.27 |
| | | | TNC | | | |

TABLE 12
Exemplary Polymorphisms Associated with Stricturing and/or Penetrating Disease in
Various Disease Locations

| | | | | | | | Minor | Odds |
|---|---|---|---|---|---|---|---|---|
| | | | | | Disease | P | Allele | Ratio |
| rsID | Marker | Population | Gene | Phenotype | Location | value | (A1) | (OR) |
| rs55768522 | ccc-9-116614041- | CD | TNFSF15, | Non- | Ileum | 4.03E−03 | A | 2.843 |
| | G-A | | TNFSF8 | Stricturing/ | | | | |
| | | | | Non- | | | | |
| | | | | Penetrating | | | | |
| rs1322057 | imm_9_116618195 | CD | TNFSF15, | Non- | Ileum | 5.15E−03 | G | 2.63 |
| | | | TNFSF8 | Stricturing/ | | | | |
| | | | | Non- | | | | |
| | | | | Penetrating | | | | |
| rs55768522 | ccc-9-116614041- | CD | TNFSF15, | Stricturing and | Ileum | 9.43E−03 | A | 2.327 |
| | G-A | | TNFSF8 | Penetrating | | | | |
| rs55768522 | ccc-9-116614041- | CD | TNFSF15, | Stricturing and | Ileocolonic | 3.61E−03 | A | 2.432 |
| | G-A | | TNFSF8 | Penetrating | | | | |

[0063] CD30, and nucleic acids encoding CD30 (TNFSF8), are characterized by NCBI Entrez Gene ID 944. CD30 is a transmembrane receptor for its ligand, CD30L, each belonging to the tumor necrosis factor (TNF) family. In some embodiments, a presence of a genotype comprising one or more polymorphisms in Table 13, is associated with a decreased level of CD30, as compared to a level of CD30 in an individual who does not have the genotype. In some embodiments, a presence of a genotype comprising one or more polymorphisms in Table 14 is associated with an increase in the level of CD30, as compared to a level of CD30 in an individual who does not have the genotype. In some instances, detection of the genotype associated with the decrease in CD30 in a sample obtained from a subject is indicative that the subject has a decreased level of CD30, as compared to an individual who does not have the genotype. In some instances, detection of the genotype associated with the increase in CD30 in a sample obtained from a subject is indicative that the subject has an increased level of CD30, as compared to an individual who does not have the genotype. An increase or a decrease in CD30 may suggest a corresponding increase or decrease in its ligand, CD30L.

[0064] In some instances, the increase or decrease in CD30 or CD30L is expressed as fold-change. “Fold-change,” as used herein, refers to a change in a quantity or level of expression of a gene, or gene expression product thereof, from an initial to a final value. Fold-change may be measured over a period of time, or at a single point in time, or a combination thereof. Fold-change may be an increase or a decrease as compared to the initial value. In some embodiments, the gene comprises deoxynucleic ribonucleic acid (DNA). In some embodiments, the gene expression product comprises ribonucleic acid (RNA), or protein, or both. In some embodiments, the RNA comprises messenger RNA (mRNA). In some embodiments, the increase or decrease in CD30 or CD30L fold-change comprises an increase of 1.1-fold, 1.2-fold, 1.3-fold, 1.4-fold, 1.5 fold, 1.6-fold, 1.7-fold, 1.8-fold, 1.9-fold, 2.0-fold, 2.1-fold, 2.2-fold, 2.3-fold, 2.4-fold, 2.5-fold, 2.6-fold, 2.7-fold, 2.8-fold, 2.0-fold, 3.0-fold, 3.1-fold, 3.2-fold, 3.3-fold, 3.4-fold, 3.5-fold, 4-fold, 5-fold, 10-fold, 20-fold, 30-fold, 40-fold, 50-fold, 60-fold, 70-fold, 80-fold, 90-fold, or 100-fold or more between the sample obtained from a subject and an expression of CD30 or CD30L in an individual who does not have the genotype associated with the increase or decrease fold-change.

[0065] In some embodiments, the increase or the decrease in CD30 or CD30L in a subject is indicative that the subject has, or will develop, a particular disease or condition. In some instances, a subject having the particular disease or condition that is related to the presence of a genotype associated with increased levels of CD30 or CD30L in the subject is suitable for treatment with an inhibitor of CD30L, such as an anti-CD30L antibody. In some instances, a subject having the particular disease or condition that is related to the presence of a genotype associated with decreased levels of CD30 or CD30L in the subject is suitable for treatment with an agonist of CD30L or CD30.

TABLE 13
Exemplary Polymorphisms Associated with a Decrease in CD30 Expression

| | | | Minor | | EQTL P |
|---|---|---|---|---|---|
| rsID | Marker | Population | Allele (A1) | EQTL Beta | Value |
| rs1322063 | imm_9_116625303 | CD | A | −0.211522625 | 4.52E−03 |
| rs1322063 | imm_9_116625303 | CD | A | −0.211522625 | 4.52E−03 |
| rs1322063 | imm_9_116625303 | IBD | A | −0.211522625 | 4.52E−03 |
| rs1322063 | imm_9_116625303 | IBD | A | −0.211522625 | 4.52E−03 |
| rs1322063 | imm_9_116625303 | UC | A | −0.211522625 | 4.52E−03 |
| rs1322063 | imm_9_116625303 | UC | A | −0.211522625 | 4.52E−03 |
| rs1322055 | imm_9_116709406 | CD | G | −0.162405569 | 1.59E−02 |
| rs1322055 | imm_9_116709406 | CD | G | −0.162405569 | 1.59E−02 |
| rs1322055 | imm_9_116709406 | IBD | G | −0.162405569 | 1.59E−02 |
| rs1322055 | imm_9_116709406 | UC | G | −0.162405569 | 1.59E−02 |
| rs1322055 | imm_9_116709406 | UC | G | −0.162405569 | 1.59E−02 |
| rs4979464 | imm_9_116641968 | CD | A | −0.162124748 | 3.72E−04 |
| rs4979464 | imm_9_116641968 | IBD | A | −0.162124748 | 3.72E−04 |
| rs4979464 | imm_9_116641968 | IBD | A | −0.162124748 | 3.72E−04 |
| rs1853187 | imm_9_116636173 | IBD | C | −0.162124748 | 3.72E−04 |
| rs4979464 | imm_9_116641968 | UC | A | −0.162124748 | 3.72E−04 |
| rs722126 | imm_9_116632599 | CD | C | −0.161421352 | 5.43E−04 |
| rs722126 | imm_9_116632599 | CD | C | −0.161421352 | 5.43E−04 |
| rs722126 | imm_9_116632599 | CD | C | −0.161421352 | 5.43E−04 |
| rs722126 | imm_9_116632599 | IBD | C | −0.161421352 | 5.43E−04 |
| rs722126 | imm_9_116632599 | IBD | C | −0.161421352 | 5.43E−04 |
| rs722126 | imm_9_116632599 | UC | C | −0.161421352 | 5.43E−04 |
| rs7040029 | imm_9_116659035 | CD | A | −0.148933465 | 1.78E−03 |
| rs7040029 | imm_9_116659035 | CD | A | −0.148933465 | 1.78E−03 |
| rs7040029 | imm_9_116659035 | CD | A | −0.148933465 | 1.78E−03 |
| rs7040029 | imm_9_116659035 | IBD | A | −0.148933465 | 1.78E−03 |
| rs7040029 | imm_9_116659035 | IBD | A | −0.148933465 | 1.78E−03 |
| rs7040029 | imm_9_116659035 | UC | A | −0.148933465 | 1.78E−03 |
| rs7866342 | imm_9_116667390 | CD | C | −0.1476006 | 1.26E−03 |
| rs7866342 | imm_9_116667390 | CD | C | −0.1476006 | 1.26E−03 |
| rs7866342 | imm_9_116667390 | CD | C | −0.1476006 | 1.26E−03 |
| rs7866342 | imm_9_116667390 | IBD | C | −0.1476006 | 1.26E−03 |
| rs7866342 | imm_9_116667390 | IBD | C | −0.1476006 | 1.26E−03 |
| rs7866342 | imm_9_116667390 | UC | C | −0.1476006 | 1.26E−03 |
| rs10817679 | imm_9_116684461 | CD | G | −0.142641776 | 1.43E−03 |
| rs10817679 | imm_9_116684461 | CD | G | −0.142641776 | 1.43E−03 |
| rs10817679 | imm_9_116684461 | IBD | G | −0.142641776 | 1.43E−03 |
| rs10817679 | imm_9_116684461 | UC | G | −0.142641776 | 1.43E−03 |
| rs911605 | imm_9_116694811 | CD | G | −0.130902603 | 3.26E−03 |
| rs911605 | imm_9_116694811 | CD | G | −0.130902603 | 3.26E−03 |
| rs911605 | imm_9_116694811 | CD | G | −0.130902603 | 3.26E−03 |
| rs911605 | imm_9_116694811 | IBD | G | −0.130902603 | 3.26E−03 |
| rs911605 | imm_9_116694811 | IBD | G | −0.130902603 | 3.26E−03 |
| rs911605 | imm_9_116694811 | UC | G | −0.130902603 | 3.26E−03 |

TABLE 14
Exemplary Polymorphisms Associated with an Increase in CD30 Expression

| | | | Minor | | EQTL P |
|---|---|---|---|---|---|
| rsID | Marker | Population | Allele (A1) | EQTL Beta | Value |
| rs10982441 | imm_9_116687420 | CD | A | 0.204073843 | 1.09E−03 |
| rs10982441 | imm_9_116687420 | IBD | A | 0.204073843 | 1.09E−03 |
| rs10982441 | imm_9_116687420 | UC | A | 0.204073843 | 1.09E−03 |
| rs10982441 | imm_9_116687420 | UC | A | 0.204073843 | 1.09E−03 |
| rs78044803 | imm_9_116652372 | CD | G | 0.199685925 | 3.17E−03 |
| rs75637575 | imm_9_116678220 | CD | A | 0.199685925 | 3.17E−03 |
| rs78044803 | imm_9_116652372 | IBD | G | 0.199685925 | 3.17E−03 |
| rs75637575 | imm_9_116678220 | IBD | A | 0.199685925 | 3.17E−03 |
| rs78044803 | imm_9_116652372 | UC | G | 0.199685925 | 3.17E−03 |
| rs75637575 | imm_9_116678220 | UC | A | 0.199685925 | 3.17E−03 |
| rs1006027 | imm_9_116731134 | CD | G | 0.155040457 | 1.88E−04 |
| rs1006027 | imm_9_116731134 | UC | G | 0.155040457 | 1.88E−04 |
| rs1006025 | imm_9_116731022 | UC | A | 0.155040457 | 1.88E−04 |
| rs10817684 | imm_9_116729005 | UC | G | 0.155040457 | 1.88E−04 |
| rs1012823 | rs1012823 | UC | A | 0.150728744 | 2.34E−02 |
| rs7036962 | imm_9_116726972 | UC | A | 0.150566068 | 2.59E−04 |
| rs10982450 | imm_9_116721691 | UC | A | 0.150566068 | 2.59E−04 |
| rs10982449 | imm_9_116716362 | UC | G | 0.150566068 | 2.59E−04 |
| rs10982454 | imm_9_116726668 | UC | A | 0.150566068 | 2.59E−04 |
| rs7037640 | imm_9_116716752 | UC | C | 0.150566068 | 2.59E−04 |
| rs1322058 | imm_9_116724368 | UC | A | 0.150566068 | 2.59E−04 |
| rs10982451 | imm_9_116722313 | UC | A | 0.150566068 | 2.59E−04 |
| rs5003740 | imm_9_116700422 | UC | C | 0.149663166 | 5.95E−03 |
| rs873212 | rs873212 | UC | G | 0.14907519 | 2.38E−02 |
| rs2208640 | imm_9_116715275 | UC | G | 0.148177117 | 2.90E−04 |
| rs927373 | imm_9_116715634 | UC | A | 0.148177117 | 2.90E−04 |
| rs3181363 | imm_9_116707063 | UC | A | 0.146548583 | 3.18E−04 |
| rs3181195 | imm_9_116707963 | UC | A | 0.146548583 | 3.18E−04 |
| rs3181366 | imm_9_116706597 | UC | A | 0.146548583 | 3.18E−04 |
| rs1006026 | imm_9_116731091 | CD | G | 0.146020987 | 1.76E−04 |
| rs1006026 | imm_9_116731091 | UC | G | 0.146020987 | 1.76E−04 |
| rs10491581 | imm_9_116649544 | CD | A | 0.137101352 | 2.81E−02 |
| rs10491581 | imm_9_116649544 | CD | A | 0.137101352 | 2.81E−02 |
| rs10491581 | imm_9_116649544 | IBD | A | 0.137101352 | 2.81E−02 |
| rs10491581 | imm_9_116649544 | IBD | A | 0.137101352 | 2.81E−02 |
| rs10491581 | imm_9_116649544 | UC | A | 0.137101352 | 2.81E−02 |
| rs3181197 | imm_9_116707592 | CD | G | 0.136412498 | 3.62E−04 |
| rs3181197 | imm_9_116707592 | UC | G | 0.136412498 | 3.62E−04 |
| rs10982431 | imm_9_116657387 | CD | A | 0.133827819 | 3.27E−02 |
| rs10982433 | imm_9_116660225 | CD | G | 0.133827819 | 3.27E−02 |
| rs2418321 | imm_9_116659868 | CD | A | 0.133827819 | 3.27E−02 |
| rs2145931 | imm_9_116660536 | CD | G | 0.133827819 | 3.27E−02 |
| rs10982431 | imm_9_116657387 | CD | A | 0.133827819 | 3.27E−02 |
| rs2145931 | imm_9_116660536 | CD | G | 0.133827819 | 3.27E−02 |
| rs10982433 | imm_9_116660225 | CD | G | 0.133827819 | 3.27E−02 |
| rs2418321 | imm_9_116659868 | CD | A | 0.133827819 | 3.27E−02 |
| rs10982431 | imm_9_116657387 | IBD | A | 0.133827819 | 3.27E−02 |
| rs10982433 | imm_9_116660225 | IBD | G | 0.133827819 | 3.27E−02 |
| rs2418321 | imm_9_116659868 | IBD | A | 0.133827819 | 3.27E−02 |
| rs2145931 | imm_9_116660536 | IBD | G | 0.133827819 | 3.27E−02 |
| rs10982431 | imm_9_116657387 | IBD | A | 0.133827819 | 3.27E−02 |
| rs2145931 | imm_9_116660536 | IBD | G | 0.133827819 | 3.27E−02 |
| rs10982433 | imm_9_116660225 | IBD | G | 0.133827819 | 3.27E−02 |
| rs10982431 | imm_9_116657387 | UC | A | 0.133827819 | 3.27E−02 |
| rs2418321 | imm_9_116659868 | UC | A | 0.133827819 | 3.27E−02 |
| rs10982433 | imm_9_116660225 | UC | G | 0.133827819 | 3.27E−02 |
| rs2145931 | imm_9_116660536 | UC | G | 0.133827819 | 3.27E−02 |
| rs10982456 | imm_9_116730579 | CD | G | 0.132394585 | 6.37E−04 |
| rs10982456 | imm_9_116730579 | UC | G | 0.132394585 | 6.37E−04 |
| rs10982417 | imm_9_116629434 | CD | A | 0.129515142 | 3.46E−02 |
| rs10982417 | imm_9_116629434 | CD | A | 0.129515142 | 3.46E−02 |
| rs4262377 | imm_9_116629395 | CD | A | 0.129515142 | 3.46E−02 |
| rs10982417 | imm_9_116629434 | IBD | A | 0.129515142 | 3.46E−02 |
| rs10982417 | imm_9_116629434 | IBD | A | 0.129515142 | 3.46E−02 |
| rs10982417 | imm_9_116629434 | UC | A | 0.129515142 | 3.46E−02 |
| rs4978611 | imm_9_116717126 | CD | C | 0.129252555 | 8.07E−04 |
| rs12352646 | imm_9_116716339 | CD | G | 0.129252555 | 8.07E−04 |
| rs3789879 | imm_9_116718057 | CD | G | 0.129252555 | 8.07E−04 |
| rs10817682 | imm_9_116716135 | CD | G | 0.129252555 | 8.07E−04 |
| rs12347977 | imm_9_116716651 | CD | A | 0.129252555 | 8.07E−04 |
| rs12338765 | imm_9_116716654 | CD | C | 0.129252555 | 8.07E−04 |
| rs12338765 | imm_9_116716654 | UC | C | 0.129252555 | 8.07E−04 |
| rs12347977 | imm_9_116716651 | UC | A | 0.129252555 | 8.07E−04 |
| rs3789879 | imm_9_116718057 | UC | G | 0.129252555 | 8.07E−04 |
| rs10817682 | imm_9_116716135 | UC | G | 0.129252555 | 8.07E−04 |
| rs4978611 | imm_9_116717126 | UC | C | 0.129252555 | 8.07E−04 |
| rs12352646 | imm_9_116716339 | UC | G | 0.129252555 | 8.07E−04 |
| rs12238227 | imm_9_116639461 | CD | G | 0.129225953 | 3.75E−02 |
| rs11554257 | imm_9_116644891 | CD | G | 0.129225953 | 3.75E−02 |
| rs12238227 | imm_9_116639461 | CD | G | 0.129225953 | 3.75E−02 |
| rs11554257 | imm_9_116644891 | CD | G | 0.129225953 | 3.75E−02 |
| rs12238227 | imm_9_116639461 | IBD | G | 0.129225953 | 3.75E−02 |
| rs11554257 | imm_9_116644891 | IBD | G | 0.129225953 | 3.75E−02 |
| rs12238227 | imm_9_116639461 | IBD | G | 0.129225953 | 3.75E−02 |
| rs12238227 | imm_9_116639461 | UC | G | 0.129225953 | 3.75E−02 |
| rs11554257 | imm_9_116644891 | UC | G | 0.129225953 | 3.75E−02 |
| rs1322056 | imm_9_116712581 | CD | G | 0.127900871 | 8.57E−04 |
| rs1322067 | imm_9_116700754 | CD | G | 0.127669396 | 8.80E−04 |
| rs1322067 | imm_9_116700754 | UC | G | 0.127669396 | 8.80E−04 |
| rs7858603 | imm_9_116703091 | CD | C | 0.126301345 | 9.36E−04 |
| rs1407309 | imm_9_116691601 | CD | A | 0.126301345 | 9.36E−04 |
| rs2974 | imm_9_116703993 | CD | G | 0.126301345 | 9.36E−04 |
| rs3181200 | imm_9_116703705 | CD | A | 0.126301345 | 9.36E−04 |
| rs2295800 | imm_9_116704032 | CD | G | 0.126301345 | 9.36E−04 |
| rs7030090 | imm_9_116702551 | CD | A | 0.126301345 | 9.36E−04 |
| rs1322054 | imm_9_116709120 | CD | G | 0.126301345 | 9.36E−04 |
| rs3181202 | imm_9_116703371 | CD | G | 0.126301345 | 9.36E−04 |
| rs3181367 | imm_9_116706499 | CD | A | 0.126301345 | 9.36E−04 |
| rs1322054 | imm_9_116709120 | UC | G | 0.126301345 | 9.36E−04 |
| rs3181367 | imm_9_116706499 | UC | A | 0.126301345 | 9.36E−04 |
| rs2295800 | imm_9_116704032 | UC | G | 0.126301345 | 9.36E−04 |
| rs1407309 | imm_9_116691601 | UC | A | 0.126301345 | 9.36E−04 |
| rs3181202 | imm_9_116703371 | UC | G | 0.126301345 | 9.36E−04 |
| rs7030090 | imm_9_116702551 | UC | A | 0.126301345 | 9.36E−04 |
| rs2974 | imm_9_116703993 | UC | G | 0.126301345 | 9.36E−04 |
| rs3181200 | imm_9_116703705 | UC | A | 0.126301345 | 9.36E−04 |
| rs7858603 | imm_9_116703091 | UC | C | 0.126301345 | 9.36E−04 |
| rs1590256 | imm_9_116633496 | CD | G | 0.125863337 | 4.34E−02 |
| rs1075074 | imm_9_116644067 | CD | G | 0.125863337 | 4.34E−02 |
| rs79894446 | imm_9_116642313 | CD | G | 0.125863337 | 4.34E−02 |
| rs1590256 | imm_9_116633496 | CD | G | 0.125863337 | 4.34E−02 |
| rs79894446 | imm_9_116642313 | CD | G | 0.125863337 | 4.34E−02 |
| rs1075074 | imm_9_116644067 | CD | G | 0.125863337 | 4.34E−02 |
| rs1590256 | imm_9_116633496 | IBD | G | 0.125863337 | 4.34E−02 |
| rs1075074 | imm_9_116644067 | IBD | G | 0.125863337 | 4.34E−02 |
| rs79894446 | imm_9_116642313 | IBD | G | 0.125863337 | 4.34E−02 |
| rs1075074 | imm_9_116644067 | UC | G | 0.125863337 | 4.34E−02 |
| rs1590256 | imm_9_116633496 | UC | G | 0.125863337 | 4.34E−02 |
| rs79894446 | imm_9_116642313 | UC | G | 0.125863337 | 4.34E−02 |
| rs6478117 | imm_9_116701965 | CD | G | 0.122173306 | 1.31E−03 |
| rs3181372 | imm_9_116705256 | CD | G | 0.122173306 | 1.31E−03 |
| rs1126711 | imm_9_116705200 | CD | G | 0.122173306 | 1.31E−03 |
| rs1126711 | imm_9_116705200 | UC | G | 0.122173306 | 1.31E−03 |
| rs3181372 | imm_9_116705256 | UC | G | 0.122173306 | 1.31E−03 |
| rs6478117 | imm_9_116701965 | UC | G | 0.122173306 | 1.31E−03 |
| rs1322059 | imm_9_116736755 | CD | A | 0.112099648 | 9.12E−03 |
| rs1322059 | imm_9_116736755 | UC | A | 0.112099648 | 9.12E−03 |
| rs2181033 | imm_9_116737652 | CD | G | 0.109173017 | 1.26E−02 |
| rs2181033 | imm_9_116737652 | UC | G | 0.109173017 | 1.26E−02 |
| rs726657 | imm_9_116736157 | CD | A | 0.101249648 | 1.29E−02 |
| rs726657 | imm_9_116736157 | UC | A | 0.101249648 | 1.29E−02 |
| rs1322060 | imm_9_116737481 | CD | G | 0.097637655 | 1.78E−02 |
| rs1322060 | imm_9_116737481 | UC | G | 0.097637655 | 1.78E−02 |
| rs3181348 | imm_9_116734005 | CD | A | 0.086202353 | 3.14E−02 |
| rs2075533 | imm_9_116733452 | CD | A | 0.086202353 | 3.14E−02 |
| rs2075533 | imm_9_116733452 | UC | A | 0.086202353 | 3.14E−02 |
| rs3181348 | imm_9_116734005 | UC | A | 0.086202353 | 3.14E−02 |
| rs911603 | imm_9_116737405 | CD | A | 0.083229479 | 4.14E−02 |
| rs911603 | imm_9_116737405 | UC | A | 0.083229479 | 4.14E−02 |

[0066] In some embodiments, the genotype is homozygous, which means two copies of the same allele at the same SNP are present. In some embodiments, the genotype is heterozygous, which means one copy of the allele at the same SNP is present. In some embodiments, the genotype comprises a polymorphism at rs911605 (SEQ ID NO: 1). For example, the genotype comprises an “A” allele at position 501 within rs911605, as indicated by SEQ ID NO: 2. In some cases, a subject having this genotype is homozygous for the “A” allele (rs911605AA). In some cases, a subject having this genotype is heterozygous (rs911605A). In some embodiments, the genotype comprises a polymorphism at rs1006026 (SEQ ID NO: 3). For example, the genotype comprises a “G” allele at position 501 within rs1006026, as indicated by SEQ ID NO: 4. In some cases, a subject having this genotype is homozygous for the “G” allele (rs1006026GG). In some cases, a subject having this genotype is heterozygous (rs1006026G).

[0067] Further provided is a haplotype comprising a polymorphism at rs911605 (SEQ ID NO: 1) and a polymorphism at rs1006026 (SEQ ID NO: 3). A “haplotype,” as used herein refers, in some instances, to a set of polymorphisms that tend to be inherited together. In some cases, the polymorphism at rs911605 comprises an “A” allele at position 501 within rs911605, as indicated by SEQ ID NO: 2. In some cases, the polymorphism at rs1006026 comprises a “G” allele at position 501 within rs1006026, as indicated by SEQ ID NO: 4. In some cases, the haplotype comprises rs911605AA and rs1006026GG.

### Methods

### Methods of Detecting a Genotype

[0068] Methods disclosed herein for detecting a genotype in a sample from a subject comprise analyzing the genetic material in the sample to detect at least one of a presence, an absence, and a quantity of a nucleic acid sequence encompassing the genotype of interest. In some cases, the nucleic acid sequence comprises DNA. In some instances, the nucleic acid sequence comprises a denatured DNA molecule or fragment thereof. In some instances, the nucleic acid sequence comprises DNA selected from: genomic DNA, viral DNA, mitochondrial DNA, plasmid DNA, amplified DNA, circular DNA, circulating DNA, cell-free DNA, or exosomal DNA. In some instances, the DNA is single-stranded DNA (ssDNA), double-stranded DNA, denaturing double-stranded DNA, synthetic DNA, and combinations thereof. The circular DNA may be cleaved or fragmented. In some instances, the nucleic acid sequence comprises RNA. In some instances, the nucleic acid sequence comprises fragmented RNA. In some instances, the nucleic acid sequence comprises partially degraded RNA. In some instances, the nucleic acid sequence comprises a microRNA or portion thereof. In some instances, the nucleic acid sequence comprises an RNA molecule or a fragmented RNA molecule (RNA fragments) selected from: a microRNA (miRNA), a pre-miRNA, a pri-miRNA, a mRNA, a pre-mRNA, a viral RNA, a viroid RNA, a virusoid RNA, circular RNA (circRNA), a ribosomal RNA (rRNA), a transfer RNA (tRNA), a pre-tRNA, a long non-coding RNA (lncRNA), a small nuclear RNA (snRNA), a circulating RNA, a cell-free RNA, an exosomal RNA, a vector-expressed RNA, an RNA transcript, a synthetic RNA, and combinations thereof.

[0069] Nucleic acid-based detection techniques that may be useful for the methods herein include quantitative polymerase chain reaction (qPCR), gel electrophoresis, immunochemistry, in situ hybridization such as fluorescent in situ hybridization (FISH), cytochemistry, and next generation sequencing. In some embodiments, the methods involve TaqMan™ qPCR, which involves a nucleic acid amplification reaction with a specific primer pair, and hybridization of the amplified nucleic acids with a hydrolysable probe specific to a target nucleic acid. The present disclosure provides exemplary probes that are hybridizable to a target nucleic acid sequence within rs911605. The present disclosure also provides exemplary probes that are hybridizable to a target nucleic acid sequence within rs1006026.

[0070] In some instances, the methods involve hybridization and/or amplification assays that include, but are not limited to, Southern or Northern analyses, polymerase chain reaction analyses, and probe arrays. Non-limiting amplification reactions include, but are not limited to, qPCR, self-sustained sequence replication, transcriptional amplification system, Q-Beta Replicase, rolling circle replication, or any other nucleic acid amplification known in the art. As discussed, reference to qPCR herein includes use of TaqMan™ methods. An additional exemplary hybridization assay includes the use of nucleic acid probes conjugated or otherwise immobilized on a bead, multi-well plate, or other substrate, wherein the nucleic acid probes are configured to hybridize with a target nucleic acid sequence of a genotype provided herein. A non-limiting method is one employed in Anal Chem. 2013 Feb. 5; 85(3):1932-9.

[0071] In some embodiments, detecting the presence or absence of a genotype comprises sequencing genetic material from the subject. Sequencing can be performed with any appropriate sequencing technology, including but not limited to single-molecule real-time (SMRT) sequencing, Polony sequencing, sequencing by ligation, reversible terminator sequencing, proton detection sequencing, ion semiconductor sequencing, nanopore sequencing, electronic sequencing, pyrosequencing, Maxam-Gilbert sequencing, chain termination (e.g., Sanger) sequencing, +S sequencing, or sequencing by synthesis. Sequencing methods also include next-generation sequencing, e.g., modem sequencing technologies such as Illumina sequencing (e.g., Solexa), Roche 454 sequencing, Ion torrent sequencing, and SOLiD sequencing. In some cases, next-generation sequencing involves high-throughput sequencing methods. Additional sequencing methods available to one of skill in the art may also be employed.

[0072] In some instances, a number of nucleotides that are sequenced are at least 5, 10, 15, 20, 25, 30, 35, 40, 45, 50, 100, 150, 200, 300,400, 500, 2000, 4000, 6000, 8000, 10000, 20000, 50000, 100000, or more than 100000 nucleotides. In some instances, the number of nucleotides sequenced is in a range of about 1 to about 100000 nucleotides, about 1 to about 10000 nucleotides, about 1 to about 1000 nucleotides, about 1 to about 500 nucleotides, about 1 to about 300 nucleotides, about 1 to about 200 nucleotides, about 1 to about 100 nucleotides, about 5 to about 100000 nucleotides, about 5 to about 10000 nucleotides, about 5 to about 1000 nucleotides, about 5 to about 500 nucleotides, about 5 to about 300 nucleotides, about 5 to about 200 nucleotides, about 5 to about 100 nucleotides, about 10 to about 100000 nucleotides, about 10 to about 10000 nucleotides, about 10 to about 1000 nucleotides, about 10 to about 500 nucleotides, about 10 to about 300 nucleotides, about 10 to about 200 nucleotides, about 10 to about 100 nucleotides, about 20 to about 100000 nucleotides, about 20 to about 10000 nucleotides, about 20 to about 1000 nucleotides, about 20 to about 500 nucleotides, about 20 to about 300 nucleotides, about 20 to about 200 nucleotides, about 20 to about 100 nucleotides, about 30 to about 100000 nucleotides, about 30 to about 10000 nucleotides, about 30 to about 1000 nucleotides, about 30 to about 500 nucleotides, about 30 to about 300 nucleotides, about 30 to about 200 nucleotides, about 30 to about 100 nucleotides, about 50 to about 100000 nucleotides, about 50 to about 10000 nucleotides, about 50 to about 1000 nucleotides, about 50 to about 500 nucleotides, about 50 to about 300 nucleotides, about 50 to about 200 nucleotides, or about 50 to about 100 nucleotides.

[0073] In some cases, a method provided herein comprises determining the presence, absence, and/or quantity of a nucleic acid sequence from a particular genotype. In some embodiments, provided is a method of detecting a genotype comprising detecting the presence, absence, and/or quantity of a nucleic acid sequence, or portion thereof, selected from SEQ ID NOS: 5-8, or a combination thereof. In some cases, a portion of a nucleic acid sequence provided herein comprises at least about 10, 15, 20, 25, 30, 35, 40, 45, or 50 contiguous nucleobases. In some cases, a portion of a nucleic acid sequence provided herein comprises between about 10 and about 50 contiguous nucleobases, between about 10 and about 40 contiguous nucleobases, between about 15 and about 50 contiguous nucleobases, between about 15 and about 40 contiguous nucleobases, between about 20 and about 50 contiguous nucleobases, and between about 20 and about 40 contiguous nucleobases. In some cases, a portion of a nucleic acid sequence provided herein comprises about 10, 11, 12, 13, 14, 15, 16, 17, 18, 19, 20, 21, 22, 23, 24, 25, 26, 27, 28, 29, 30, 31, 32, 33, 34, 35, 36, 37, 38, 39, 40, 41, 42, 43, 44, 45, 46, 47, 48, 49, or 50 contiguous nucleobases. In some cases, a portion of a nucleic acid sequence comprising SEQ ID NO: 5 comprises an “A” allele at the bracketed position. In some cases, a portion of a nucleic acid sequence comprising SEQ ID NO: 5 comprises a “G” allele at the bracketed position. In some cases, a portion of a nucleic acid sequence comprising SEQ ID NO: 6 comprises an “A” allele at the bracketed position. In some cases, a portion of a nucleic acid sequence comprising SEQ ID NO: 6 comprises a “G” allele at the bracketed position. In some cases, a portion of a nucleic acid sequence comprising SEQ ID NO: 7 comprises an “A” allele at the bracketed position. In some cases, a portion of a nucleic acid sequence comprising SEQ ID NO: 7 comprises a “G” allele at the bracketed position. In some cases, a portion of a nucleic acid sequence comprising SEQ ID NO: 8 comprises an “A” allele at the bracketed position. In some cases, a portion of a nucleic acid sequence comprising SEQ ID NO: 8 comprises a “G” allele at the bracketed position.

[0074] In some embodiments, the method comprises determining the presence or absence of a rs911605A genotype in a sample of genetic material from a subject, as determined by detecting the presence or absence of: SEQ ID NO: 5, SEQ ID NO: 6, a portion of SEQ ID NO: 5, a portion of SEQ ID NO: 6, or a combination thereof, in the genetic material. In some cases, if the subject comprises the rs911605A genotype, the subject is administered an inhibitor of CD30L. In some cases, if the subject is homozygous for rs911605A, the subject is administered an inhibitor of CD30L.

[0075] In some embodiments, the method comprises determining the presence or absence of a rs911605A genotype in a sample of genetic material from a subject, as determined by detecting the presence or absence of: a nucleic acid sequence at least or about 90% identical to SEQ ID NO: 5, a nucleic acid sequence at least or about 90% identical to SEQ ID NO: 6, a nucleic acid sequence at least or about 90% identical to a portion of SEQ ID NO: 5, a nucleic acid sequence at least or about 90% identical to a portion of SEQ ID NO: 6, or a combination thereof, in the genetic material. In some cases, if the subject comprises the rs911605A genotype, the subject is administered an inhibitor of CD30L. In some cases, if the subject is homozygous for rs911605A, the subject is administered an inhibitor of CD30L.

[0076] In some embodiments, the method comprises determining the presence or absence of a rs911605A genotype in a sample of genetic material from a subject, as determined by detecting the presence or absence of: a nucleic acid sequence at least or about 95% identical to SEQ ID NO: 5, a nucleic acid sequence at least or about 95% identical to SEQ ID NO: 6, a nucleic acid sequence at least or about 95% identical to a portion of SEQ ID NO: 5, a nucleic acid sequence at least or about 95% identical to a portion of SEQ ID NO: 6, or a combination thereof, in the genetic material. In some cases, if the subject comprises the rs911605A genotype, the subject is administered an inhibitor of CD30L. In some cases, if the subject is homozygous for rs911605A, the subject is administered an inhibitor of CD30L.

[0077] In some embodiments, the method comprises determining the presence or absence of a rs1006026G genotype in a sample of genetic material from a subject, as determined by detecting the presence or absence of: SEQ ID NO: 7, SEQ ID NO: 8, a portion of SEQ ID NO: 7, a portion of SEQ ID NO: 8, or a combination thereof, in the genetic material. In some cases, if the subject comprises the rs1006026G genotype, the subject is administered an inhibitor of CD30L. In some cases, if the subject is homozygous for rs1006026G, the subject is administered an inhibitor of CD30L.

[0078] In some embodiments, the method comprises determining the presence or absence of a rs1006026G genotype in a sample of genetic material from a subject, as determined by detecting the presence or absence of: a nucleic acid sequence at least or about 90% identical to SEQ ID NO: 7, a nucleic acid sequence at least or about 90% identical to SEQ ID NO: 8, a nucleic acid sequence at least or about 90% identical to a portion of SEQ ID NO: 7, a nucleic acid sequence at least or about 90% identical to a portion of SEQ ID NO: 8, or a combination thereof, in the genetic material. In some cases, if the subject comprises the rs1006026G genotype, the subject is administered an inhibitor of CD30L. In some cases, if the subject is homozygous for rs1006026G, the subject is administered an inhibitor of CD30L.

[0079] In some embodiments, the method comprises determining the presence or absence of a rs1006026G genotype in a sample of genetic material from a subject, as determined by detecting the presence or absence of: a nucleic acid sequence at least or about 95% identical to SEQ ID NO: 7, a nucleic acid sequence at least or about 95% identical to SEQ ID NO: 8, a nucleic acid sequence at least or about 95% identical to a portion of SEQ ID NO: 7, a nucleic acid sequence at least or about 95% identical to a portion of SEQ ID NO: 8, or a combination thereof, in the genetic material. In some cases, if the subject comprises the rs1006026G genotype, the subject is administered an inhibitor of CD30L. In some cases, if the subject is homozygous for rs1006026G, the subject is administered an inhibitor of CD30L.

[0080] In some embodiments, the method comprises determining the presence or absence of a haplotype comprising rs911605A and rs1006026G in a sample of genetic material from a subject, as determined by detecting the presence or absence in the genetic material of: (a) SEQ ID NO: 5, SEQ ID NO: 6, a portion of SEQ ID NO: 5, a portion of SEQ ID NO: 6, or a combination thereof; and (b) SEQ ID NO: 7, SEQ ID NO: 8, a portion of SEQ ID NO: 7, a portion of SEQ ID NO: 8, or a combination thereof. In some cases, if the subject comprises rs911605A and rs1006026G, the subject is administered an inhibitor of CD30L. In some cases, if the subject is homozygous for rs911605A and homozygous for rs1006026G, the subject is administered an inhibitor of CD30L.

[0081] In some embodiments, the method comprises determining the presence or absence of a haplotype comprising rs911605A and rs1006026G in a sample of genetic material from a subject, as determined by detecting the presence or absence in the genetic material of: (a) a nucleic acid sequence at least or about 90% identical to SEQ ID NO: 5, a nucleic acid sequence at least or about 90% identical to SEQ ID NO: 6, a nucleic acid sequence at least or about 90% identical to a portion of SEQ ID NO: 5, a nucleic acid sequence at least or about 90% identical to a portion of SEQ ID NO: 6, or a combination thereof; and (b) a nucleic acid sequence at least or about 90% identical to SEQ ID NO: 7, a nucleic acid sequence at least or about 90% identical to SEQ ID NO: 8, a nucleic acid sequence at least or about 90% identical to a portion of SEQ ID NO: 7, a nucleic acid sequence at least or about 90% identical to a portion of SEQ ID NO: 8, or a combination thereof. In some cases, if the subject comprises rs911605A and rs1006026G, the subject is administered an inhibitor of CD30L. In some cases, if the subject is homozygous for rs911605A and homozygous for rs1006026G, the subject is administered an inhibitor of CD30L.

[0082] In some embodiments, the method comprises determining the presence or absence of a haplotype comprising rs911605A and rs1006026G in a sample of genetic material from a subject, as determined by detecting the presence or absence in the genetic material of: (a) a nucleic acid sequence at least or about 95% identical to SEQ ID NO: 5, a nucleic acid sequence at least or about 95% identical to SEQ ID NO: 6, a nucleic acid sequence at least or about 95% identical to a portion of SEQ ID NO: 5, a nucleic acid sequence at least or about 95% identical to a portion of SEQ ID NO: 6, or a combination thereof; and (b) a nucleic acid sequence at least or about 95% identical to SEQ ID NO: 7, a nucleic acid sequence at least or about 95% identical to SEQ ID NO: 8, a nucleic acid sequence at least or about 95% identical to a portion of SEQ ID NO: 7, a nucleic acid sequence at least or about 95% identical to a portion of SEQ ID NO: 8, or a combination thereof. In some cases, if the subject comprises rs911605A and rs1006026G, the subject is administered an inhibitor of CD30L. In some cases, if the subject is homozygous for rs911605A and homozygous for rs1006026G, the subject is administered an inhibitor of CD30L.

[0083] In some instances, a method of detecting a genotype comprises contacting nucleic acids from a sample of a subject with a nucleic acid polymer that hybridizes to a region of a target nucleic acid sequence. In some cases, the target nucleic acid sequence is a sequence comprising at least about 30, 40, 50, 60, 70, 80, 90, 100, or all of SEQ ID NO: 1, wherein the target nucleic acid sequence comprises the nucleobase at position 501. In some cases, the region of the target nucleic acid sequence comprises the nucleobase at position 501 of SEQ ID NO: 1. In some cases, the target nucleic acid sequence is a sequence comprising at least about 30, 40, 50, 60, 70, 80, 90, 100, or all of SEQ ID NO: 2, wherein the target nucleic acid sequence comprises the nucleobase at position 501. In some cases, the region of the target nucleic acid sequence comprises the nucleobase at position 501 of SEQ ID NO: 2. In some cases, the target nucleic acid sequence is a sequence comprising at least about 30, 40, 50, 60, 70, 80, 90, 100, or all of SEQ ID NO: 3, wherein the target nucleic acid sequence comprises the nucleobase at position 501. In some cases, the region of the target nucleic acid sequence comprises the nucleobase at position 501 of SEQ ID NO: 3. In some cases, the target nucleic acid sequence is a sequence comprising at least about 30, 40, 50, 60, 70, 80, 90, 100, or all of SEQ ID NO: 4, wherein the target nucleic acid sequence comprises the nucleobase at position 501. In some cases, the region of the target nucleic acid sequence comprises the nucleobase at position 501 of SEQ ID NO: 4. In some cases, the method is a multiplex assay where two or more target nucleic acid sequences are detected. As an example, the method comprises detecting the target nucleic acid sequence comprising the nucleobase at position 501 of SEQ ID NO: 1 and the target nucleic acid sequence comprising the nucleobase at position 501 of SEQ ID NO: 3. As another example, the method comprises detecting the target nucleic acid sequence comprising the nucleobase at position 501 of SEQ ID NO: 2 and the target nucleic acid sequence comprising the nucleobase at position 501 of SEQ ID NO: 4.

[0084] The nucleic acid polymer can comprise an oligonucleotide of at least or about 5, 10, 15, 20, 25, 30, 35, 40, 45, 50, 75, 100 or more nucleobases in length and sufficient to specifically hybridize to a target nucleic acid sequence as described herein. In some instances, the nucleic acid polymer comprises between about 10 and about 100 nucleobases, between about 10 and about 75 nucleobases, between about 10 and about 50 nucleobases, between about 15 and about 100 nucleobases, between about 15 and about 75 nucleobases, between about 15 and about 50 nucleobases, between about 20 and about 100 nucleobases, between about 20 and about 75 nucleobases, between about 20 and about 50 nucleobases, between about 25 and about 100 nucleobases, between about 25 and about 75 nucleobases, or between about 25 and about 50 nucleobases. In some instances, the nucleic acid polymer hybridizes to a region of a target nucleic acid sequence of least one of SEQ ID NOS: 1-8. In some instances, the nucleic acid polymer hybridizes to a target nucleic acid sequence comprising SEQ ID NO: 1. In some instances, the nucleic acid polymer hybridizes to a target nucleic acid sequence comprising SEQ ID NO: 2. In some instances, the nucleic acid polymer hybridizes to a target nucleic acid sequence comprising SEQ ID NO: 3. In some instances, the nucleic acid polymer hybridizes to a target nucleic acid sequence comprising SEQ ID NO: 4. In some instances, the nucleic acid polymer hybridizes to a target nucleic acid sequence comprising SEQ ID NO: 5. In some instances, the nucleic acid polymer hybridizes to a target nucleic acid sequence comprising SEQ ID NO: 6. In some instances, the nucleic acid polymer hybridizes to a target nucleic acid sequence comprising SEQ ID NO: 7. In some instances, the nucleic acid polymer hybridizes to a target nucleic acid sequence comprising SEQ ID NO: 8. Hybridization may occur at standard hybridization temperatures, e.g., between about 35° C. and about 65° C. in a standard PCR buffer.

[0085] Further provided are primers useful for amplifying a nucleic acid of a target nucleic acid described herein. For example, for use in an amplification assay such as qPCR. In some instances, the primers hybridize to at least a portion of one of SEQ ID NOS: 1-8. In some instances, provided is a forward primer that hybridizes to at least about 10 contiguous bases of SEQ ID NO: 1, and a reverse primer that hybridizes to at least 10 contiguous bases of SEQ ID NO: 1, such that the forward and reverse primer flank nucleobase position 501 in SEQ ID NO: 1. In some instances, provided is a forward primer that hybridizes to at least about 10 contiguous bases of SEQ ID NO: 2, and a reverse primer that hybridizes to at least 10 contiguous bases of SEQ ID NO: 2, such that the forward and reverse primer flank nucleobase position 501 in SEQ ID NO: 2. In some instances, provided is a forward primer that hybridizes to at least about 10 contiguous bases of SEQ ID NO: 3, and a reverse primer that hybridizes to at least 10 contiguous bases of SEQ ID NO: 3, such that the forward and reverse primer flank nucleobase position 501 in SEQ ID NO: 3. In some instances, provided is a forward primer that hybridizes to at least about 10 contiguous bases of SEQ ID NO: 4, and a reverse primer that hybridizes to at least 10 contiguous bases of SEQ ID NO: 4, such that the forward and reverse primer flank nucleobase position 501 in SEQ ID NO: 4.

[0086] In some cases, provided is a forward primer comprising SEQ ID NO 9. In some cases, provided is a forward primer comprising at least about 70%, 80%, 85%, 90%, 91%, 92%, 93%, 94%, 95%, 96%, 97%, 98% or 99% sequence identity to SEQ ID NO: 9. In some cases, provided is a reverse primer comprising SEQ ID NO 10. In some cases, provided is a reverse primer comprising at least about 70%, 80%, 85%, 90%, 91%, 92%, 93%, 94%, 95%, 96%, 97%, 98% or 99% sequence identity to SEQ ID NO: 10. In some cases, provided is a primer pair comprising a forward primer comprising SEQ ID NO: 9 and a reverse primer comprising SEQ ID NO: 10. In some cases, provided is a primer pair comprising a forward primer comprising at least about 70%, 80%, 85%, 90%, 91%, 92%, 93%, 94%, 95%, 96%, 97%, 98% or 99% sequence identity to SEQ ID NO: 9, and a reverse primer comprising at least about 70%, 80%, 85%, 90%, 91%, 92%, 93%, 94%, 95%, 96%, 97%, 98% or 99% sequence identity to SEQ ID NO: 10.

[0087] In some cases, provided is a forward primer comprising SEQ ID NO 11. In some cases, provided is a forward primer comprising at least about 70%, 80%, 85%, 90%, 91%, 92%, 93%, 94%, 95%, 96%, 97%, 98% or 99% sequence identity to SEQ ID NO: 11. In some cases, provided is a reverse primer comprising SEQ ID NO 12. In some cases, provided is a reverse primer comprising at least about 70%, 80%, 85%, 90%, 91%, 92%, 93%, 94%, 95%, 96%, 97%, 98% or 99% sequence identity to SEQ ID NO: 12. In some cases, provided is a primer pair comprising a forward primer comprising SEQ ID NO: 11 and a reverse primer comprising SEQ ID NO: 12. In some cases, provided is a primer pair comprising a forward primer comprising at least about 70%, 80%, 85%, 90%, 91%, 92%, 93%, 94%, 95%, 96%, 97%, 98% or 99% sequence identity to SEQ ID NO: 11, and a reverse primer comprising at least about 70%, 80%, 85%, 90%, 91%, 92%, 93%, 94%, 95%, 96%, 97%, 98% or 99% sequence identity to SEQ ID NO: 12.

[0088] Further provided are probe or reporter sequences that hybridize to a target nucleic acid described herein. As a non-limiting example, a target nucleic acid of rs911605 and/or rs1006026. In some cases the probes are reporters that comprise a dye label on one end and a quencher on the other end. When the probes are hybridized to a target nucleic acid, an added DNA polymerase may cleave those hybridized probes, separating the reporter dye from the quencher, and thus increasing fluorescence by the reporter. In some cases, provided is a probe comprising a nucleic acid polymer sequence described above herein. The probes may be used to detect and/or quantify the presence of a target nucleic acid in a given sample.

[0089] In some instances, provided is a probe comprising SEQ ID NO: 13. In some instances, provided is a probe comprises at least 70%, 80%, 85%, 90%, 91%, 92%, 93%, 94%, 95%, 96%, 97%, 98% or 99% sequence identity to SEQ ID NO: 13. In some instances, provided is a probe comprising SEQ ID NO: 14. In some instances, provided is a probe comprises at least 70%, 80%, 85%, 90%, 91%, 92%, 93%, 94%, 95%, 96%, 97%, 98% or 99% sequence identity to SEQ ID NO: 14. In some instances, provided is a probe comprising SEQ ID NO: 15. In some instances, provided is a probe comprises at least 70%, 80%, 85%, 90%, 91%, 92%, 93%, 94%, 95%, 96%, 97%, 98% or 99% sequence identity to SEQ ID NO: 15. In some instances, provided is a probe comprising SEQ ID NO: 16. In some instances, provided is a probe comprises at least 70%, 80%, 85%, 90%, 91%, 92%, 93%, 94%, 95%, 96%, 97%, 98% or 99% sequence identity to SEQ ID NO: 16.

[0090] Examples of molecules that are utilized as probes include, but are not limited to, RNA and DNA. In some embodiments, the term “probe” with regards to nucleic acids, refers to any molecule that is capable of selectively binding to a specifically intended target nucleic acid sequence. In some instances, probes are specifically designed to be labeled, for example, with a radioactive label, a fluorescent label, an enzyme, a chemiluminescent tag, a colorimetric tag, or other labels or tags that are known in the art. In some instances, the fluorescent label comprises a fluorophore. In some instances, the fluorophore is an aromatic or heteroaromatic compound. In some instances, the fluorophore is a pyrene, anthracene, naphthalene, acridine, stilbene, benzoxaazole, indole, benzindole, oxazole, thiazole, benzothiazole, canine, carbocyanine, salicylate, anthranilate, xanthenes dye, coumarin. Exemplary xanthene dyes include, e.g., fluorescein and rhodamine dyes. Fluorescein and rhodamine dyes include, but are not limited to 6-carboxyfluorescein (FAM), 2′7′-dimethoxy-4′5′-dichloro-6-carboxyfluorescein (JOE), tetrachlorofluorescein (TET), 6-carboxyrhodamine (R6G), N,N,N; N′-tetramethyl-6-carboxyrhodamine (TAMRA), 6-carboxy-X-rhodamine (ROX). Suitable fluorescent probes also include the naphthylamine dyes that have an amino group in the alpha or beta position. For example, naphthylamino compounds include 1-dimethylaminonaphthyl-5-sulfonate, 1-anilino-8-naphthalene sulfonate and 2-p-toluidinyl-6-naphthalene sulfonate, 5-(2′-aminoethyl)aminonaphthalene-1-sulfonic acid (EDANS). Exemplary coumarins include, e.g., 3-phenyl-7-isocyanatocoumarin; acridines, such as 9-isothiocyanatoacridine and acridine orange; N-(p-(2-benzoxazolyl)phenyl) maleimide; cyanines, such as, e.g., indodicarbocyanine 3 (Cy3), indodicarbocyanine 5 (Cy5), indodicarbocyanine 5.5 (Cy5.5), 3-(-carboxy-pentyl)-3′-ethyl-5,5′-dimethyloxacarbocyanine (CyA); 1H, 5H, 11H, 15H-Xantheno[2,3,4-ij: 5,6,7-i‘j’]diquinolizin-18-ium, 9-[2 (or 4)-[[[6-[2,5-dioxo-1-pyrrolidinyl)oxy]-6-oxohexyl]amino]sulfonyl]-4 (or 2)-sulfophenyl]-2,3,6,7,12,13,16,17-octahydro-inner salt (TR or Texas Red); or BODIPY™ dyes. In some cases, the probe comprises FAM as the dye label.

[0091] In some instances, primers and/or probes described herein for detecting a target nucleic acid are used in an amplification reaction. In some instances, the amplification reaction is qPCR. An exemplary qPCR is a method employing a TaqMan™ assay.

[0092] In some instances, qPCR comprises using an intercalating dye. Examples of intercalating dyes include SYBR green I, SYBR green II, SYBR gold, ethidium bromide, methylene blue, Pyronin Y, DAPI, acridine orange, Blue View or phycoerythrin. In some instances, the intercalating dye is SYBR.

[0093] In some instances, a number of amplification cycles for detecting a target nucleic acid in an amplification assay is about 5 to about 30 cycles. In some instances, the number of amplification cycles for detecting a target nucleic acid is at least about 5 cycles. In some instances, the number of amplification cycles for detecting a target nucleic acid is at most about 30 cycles. In some instances, the number of amplification cycles for detecting a target nucleic acid is about 5 to about 10, about 5 to about 15, about 5 to about 20, about 5 to about 25, about 5 to about 30, about 10 to about 15, about 10 to about 20, about 10 to about 25, about 10 to about 30, about 15 to about 20, about 15 to about 25, about 15 to about 30, about 20 to about 25, about 20 to about 30, or about 25 to about 30 cycles.

[0094] In one aspect, the methods provided herein for determining the presence, absence, and/or quantity of a nucleic acid sequence from a particular genotype comprise an amplification reaction such as qPCR. In an exemplary method, genetic material is obtained from a sample of a subject, e.g., a sample of blood or serum. In certain embodiments where nucleic acids are extracted, the nucleic acids are extracted using any technique that does not interfere with subsequent analysis. In certain embodiments, this technique uses alcohol precipitation using ethanol, methanol or isopropyl alcohol. In certain embodiments, this technique uses phenol, chloroform, or any combination thereof. In certain embodiments, this technique uses cesium chloride. In certain embodiments, this technique uses sodium, potassium or ammonium acetate or any other salt commonly used to precipitate DNA. In certain embodiments, this technique utilizes a column or resin based nucleic acid purification scheme such as those commonly sold commercially, one non-limiting example would be the GenElute Bacterial Genomic DNA Kit available from Sigma Aldrich. In certain embodiments, after extraction the nucleic acid is stored in water, Tris buffer, or Tris-EDTA buffer before subsequent analysis. In an exemplary embodiment, the nucleic acid material is extracted in water. In some cases, extraction does not comprise nucleic acid purification.

[0095] In the exemplary qPCR assay, the nucleic acid sample is combined with primers and probes specific for a target nucleic acid that may or may not be present in the sample, and a DNA polymerase. An amplification reaction is performed with a thermal cycler that heats and cools the sample for nucleic acid amplification, and illuminates the sample at a specific wavelength to excite a fluorophore on the probe and detect the emitted fluorescence. For TaqMan™ methods, the probe may be a hydrolysable probe comprising a fluorophore and quencher that is hydrolyzed by DNA polymerase when hybridized to a target nucleic acid. In some cases, the presence of a target nucleic acid is determined when the number of amplification cycles to reach a threshold value is less than 30, 29, 28, 27, 26, 25, 24, 23, 22, 21, or 20 cycles. In some cases, a target nucleic acid comprises SEQ ID NO: 5, and the presence of the target nucleic acid is indicative of a rs911605A genotype. In some cases, a target nucleic acid comprises SEQ ID NO: 6, and the presence of the target nucleic acid is indicative of a rs911605A genotype. In some cases, a target nucleic acid comprises SEQ ID NO: 7, and the presence of the target nucleic acid is indicative of a rs1006026G genotype. In some cases, a target nucleic acid comprises SEQ ID NO: 8, and the presence of the target nucleic acid is indicative of a rs1006026G genotype. The primers and probes in the assay may include any combination of the primers and probes described herein. As such, a multiplex assay may be performed where a haplotype comprising rs911605A and rs1006026G is detectable in the assay.

### Methods of Detecting and Quantifying Soluble CD30

[0096] Aspects provided herein are methods of analyzing CD30 protein levels in a subject by detecting and quantifying said levels from a sample of the subject. Non-limiting examples of sample materials include serum, plasma, and/or whole blood. CD30 may be detected by use of an antibody-based assay, where an anti-CD30 antibody is utilized. For antibody-based detection methods, the anti-CD30 antibody may bind to any region of CD30. In some cases, the anti-CD30 antibody binds to a region of a CD30 protein having SEQ ID NO: 17, or SEQ ID NO: 18, or a sequence of any CD30 protein-coding isoform (for e.g., P28908). In some cases, the anti-CD30 antibody binds to a region of a CD30 protein having a sequence at least or about 70%, 80%, 85%, 90%, 91%, 92%, 93%, 94%, 95%, 96%, 97%, 98%, 99%, or 100% sequence identity SEQ ID NO: 17. An exemplary method of analysis comprises performing an enzyme-linked immunosorbent assay (ELISA). The ELISA assay may be a sandwich ELISA or a direct ELISA. Other exemplary methods of detection includes immunohistochemistry and lateral flow assay.

[0097] In some cases, CD30 protein may be detected by detecting binding between CD30 and CD30L. Methods of analysis of binding between CD30 and CD30L comprise performing an assay in vivo or in vitro, or ex vivo. In some instances, the assay may comprise co-immunoprecipitation (co-IP), pull-down, crosslinking protein interaction analysis, labeled transfer protein interaction analysis, or Far-western blot analysis, FRET based assay, including, for example FRET-FLIM, a yeast two-hybrid assay, BiFC, or split luciferase assay.

### Methods of Characterizing a Disease or Condition or Subtype Thereof

[0098] Disclosed herein are methods of characterizing a disease or a condition, or a subtype or symptom of the disease or the condition in a subject. In some cases, the disease or condition is at least on of an inflammatory disease, fibrostenotic disease, and fibrotic disease. In some instances, the inflammatory diseases is Crohn's disease (CD). In some instances, the inflammatory disease is ulcerative colitis (UC). In some instances, the inflammatory disease is systemic lupus erythematosus (SLE). In some instances, the inflammatory disease is rheumatoid arthritis (RA). In some instances, the fibrotic disease is primary sclerosing cholangitis (PSC). The subject may be diagnosed with the disease or the condition, and embodiments disclosed herein provide methods of characterizing the disease or condition as being a severe form of the disease or the condition (e.g., refractory disease). In some instances, the severe form of the disease is characterized by a presence of, or susceptibility to developing, a subclinical phenotype of the disease or the condition, such as for example, perianal disease (e.g., pCD), stricturing disease, penetrating disease, stricturing and penetrating disease, ileal disease, and ileocolonic disease.

[0099] Aspects disclosed herein provide methods of characterizing a disease or a condition, or a subtype of the disease or the condition comprising: (a) subjecting a sample obtained from a subject to an assay configured to detect a presence, absence, or a level of a genotype; and (b) characterizing the disease as being a severe form of the disease or the condition, provided the presence or the level of the genotype is detected in the sample obtained from the subject. In some instances, genotype comprises at least one polymorphism selected from Tables 1-14. In some cases, the genotype comprises a rs911605A genotype (e.g., comprise an “A” allele at position 501 of rs911605). In some instances, the genotype is a haplotype comprising a rs911605A genotype (e.g., comprise an “A” allele at position 501 of rs911605) and a rs1006026G genotype (e.g., comprise a “G” allele at position 501 of rs1006026) is detected in a sample obtained from the subject. In some instances, the genotype comprises a rs1006026G genotype (e.g., comprise a “G” allele at position 501 of rs1006026). In some instances, the subtype of the disease or the condition comprises a subclinical phenotype selected from the group consisting of non-stricturing disease, stricturing disease, stricturing and penetrating disease, perianal Crohn's disease (pCD), defects in Paneth cells, PSC, and development of blood clots (e.g. thrombus). In some instances, a therapeutic agent is administered to the subject, provided the presence of the genotype is detected in the sample obtained from the subject. In some instances, the therapeutic agent is an inhibitor of CD30 ligand, TL1A, or a combination thereof. In some instances, the genotype is detected in the sample obtained from the subject using the methods described herein, such as for e.g., a genotyping device (e.g., qPCR, sequencer, microarray, and the like).

### Methods of Diagnosis and Prognosis

[0100] Disclosed herein are methods of diagnosing or determining a susceptibility to developing (e.g., delivering a prognosis of) a disease or a condition, or a subtype or symptom of the disease or the condition in a subject. In some cases, the disease or condition is at least on of an inflammatory disease, fibrostenotic disease, and fibrotic disease. In some instances, the inflammatory diseases is Crohn's disease (CD). In some instances, the inflammatory disease is ulcerative colitis (UC). In some instances, the inflammatory disease is systemic lupus erythematosus (SLE). In some instances, the inflammatory disease is rheumatoid arthritis (RA). In some instances, the fibrotic disease is primary sclerosing cholangitis (PSC). The subject may be diagnosed with the disease or the condition, and embodiments disclosed herein provide methods of characterizing the disease or condition as being a severe form of the disease or the condition (e.g., refractory disease). In some instances, the severe form of the disease is characterized by a presence of, or susceptibility to developing, a subclinical phenotype of the disease or the condition, such as for example, perianal disease (e.g., pCD), stricturing disease, penetrating disease, stricturing and penetrating disease, ileal disease, and ileocolonic disease.

[0101] Aspects disclosed herein provide methods of diagnosing in a subject a disease or a condition a disease or a condition, or a subtype of the disease or the condition comprising: (a) subjecting a sample obtained from a subject to an assay configured to detect a presence, absence, or a level of a genotype; and (b) diagnosis the disease as being a severe form of the disease or the condition, provided the presence or the level of the genotype is detected in the sample obtained from the subject.

[0102] Also provided herein are methods of determining a susceptibility to developing a disease or a condition a disease or a condition, or a subtype of the disease or the condition, in a subject, the methods comprising: (a) subjecting a sample obtained from a subject to an assay configured to detect a presence, absence, or a level of a genotype; and (b) determining a risk of developing the disease or the condition, or the subtype of the disease or the condition, in the subject, provided the presence or the level of the genotype is detected in the sample obtained from the subject.

[0103] In some instances, genotype comprises at least one polymorphism selected from Tables 1-14. In some cases, the genotype comprises a rs911605A genotype (e.g., comprise an “A” allele at position 501 of rs911605). In some instances, the genotype is a haplotype comprising a rs911605A genotype (e.g., comprise an “A” allele at position 501 of rs911605) and a rs1006026G genotype (e.g., comprise a “G” allele at position 501 of rs1006026) is detected in a sample obtained from the subject. In some instances, the genotype comprises a rs1006026G genotype (e.g., comprise a “G” allele at position 501 of rs1006026). In some instances, the subtype of the disease or the condition comprises a subclinical phenotype selected from the group consisting of non-stricturing disease, stricturing disease, stricturing and penetrating disease, perianal Crohn's disease (pCD), defects in Paneth cells, PSC, and development of blood clots (e.g. thrombus). In some instances, a presence of the genotype is indicative of an increased level of CD30 ligand in the subject, as compared to an individual who does not carry the genotype. In some instances, a therapeutic agent is administered to the subject, provided the presence of the genotype is detected in the sample obtained from the subject. In some instances, the therapeutic agent is an inhibitor of CD30 ligand, TL1A, or a combination thereof. In some instances, the genotype is detected in the sample obtained from the subject using the methods described herein, such as for e.g., a genotyping device (e.g., qPCR, sequencer, microarray, and the like).

### Methods of Treatment

[0104] Further provided herein are methods of treating a disease or condition in a subject. In some cases, the disease or condition is at least on of an inflammatory disease, fibrostenotic disease, and fibrotic disease. In some instances, the inflammatory diseases is Crohn's disease (CD). In some instances, the inflammatory disease is ulcerative colitis (UC). In some instances, the inflammatory disease is systemic lupus erythematosus (SLE). In some instances, the inflammatory disease is rheumatoid arthritis (RA). In some instances, the fibrotic disease is primary sclerosing cholangitis (PSC).

[0105] Disclosed herein are methods of treating a disease or condition disclosed herein in a subject by administrating to the subject an inhibitor of CD30L, provided a genotype disclosed herein is detected in a sample obtained from the subject. The genotype can be any one of the genotypes described in the embodiments provided in the present disclosure, including but not limited to any one or, or combination of, polymorphisms from Tables 1-14. In some cases, the genotype comprises a rs911605A genotype (e.g., comprise an “A” allele at position 501 of rs911605). In some instances, disclosed herein are methods of treating a subject suffering from a disease or condition disclosed herein by administering to the subject an inhibitor of CD30L, provided that a haplotype comprising a rs911605A genotype (e.g., comprise an “A” allele at position 501 of rs911605) and a rs1006026G genotype (e.g., comprise a “G” allele at position 501 of rs1006026) is detected in a sample obtained from the subject. In some cases, the genotype is detected in the sample obtained from the subject using methods of detection disclosed herein.

[0106] Aspects disclosed herein provide methods of monitoring a progression of treatment of a subject with an inhibitor of CD30L. In some instances, monitoring comprises quantifying soluble CD30 or CD30L levels in a sample from the subject prior to and after administration of the inhibitor of CD30L. Also disclosed herein are methods of optimizing the treatment of a subject comprising: determining the quantity of CD30 and/or CD30L in a sample from a treated subject and modifying, discontinuing, or continuing the treatment based on the quantity.

### Inhibitors of CD30L

[0107] In some instances, the treatment comprises administering to the individual a therapeutic agent comprising an inhibitor of CD30L. In some embodiments, an inhibitor of CD30L specifically binds directly or indirectly to CD30L, CD30, or a molecule that interferes directly or indirectly with binding between CD30L and CD30. In some embodiments, as used herein, an inhibitor of CD30L comprises an agent that modulates at least one functional activity of CD30L, such as binding to CD30. Non-limiting examples of inhibitors of CD30L include agents that specifically bind to CD30L, including a polypeptide such as an anti-CD30L antibody or antigen binding fragment thereof, and a nucleic acid, e.g., an antisense construct, siRNA, and ribozyme. An antisense construct includes an expression plasmid that when transcribed in the cell produces RNA complementary to a portion of mRNA encoding CD30L, and an oligonucleotide that inhibits protein expression by hybridizing with the CD30L mRNA. In some embodiments the inhibitor of CD30L comprises a non-polypeptide or non-nucleic acid portion as an active agent that binds to and inhibits CD30L activity.

[0108] In some embodiments, an inhibitor of CD30L is a polypeptide that binds to CD30L and/or CD30. In some cases, the polypeptide is a CD30 polypeptide or a portion thereof, wherein the portion retains the ability to bind to CD30L. A portion of a CD30 polypeptide includes at least about 10, 15, 20, 25, 30, 35, 40, 45, or 50 amino acids that have at least about 85%, 90%, or 95% identity to human CD30 having SEQ ID NO: 17 or SEQ ID NON: 18. For example, an inhibitor of CD30L comprises a CD30 polypeptide that comprises all or part of the extracellular region of human CD30. In some embodiments, the CD30 polypeptide comprises amino acids 19-390 of SEQ ID NO: 18 or a binding fragment thereof, having at least about 85%, 90%, or 95% sequence identity to CD30. In some embodiments, the CD30 polypeptide is a homologue of mammalian CD30, e.g., the CD30 polypeptide inhibitor of CD30L is a viral CD30 polypeptide or fragment thereof. As a non-limiting example, the viral CD30 polypeptide comprises viral CD30 from a poxvirus, such as ectromelia virus or cowpox virus.

[0109] In anon-limiting example, the inhibitor is an anti-CD30L antibody or an anti-CD30 antibody. As used herein, an antibody includes an antigen-binding fragment of a full length antibody, e.g., a Fab or scFv. In some embodiments, the antibody binds to the extracellular domain of CD30L. In some embodiments, an anti-CD30L antibody comprises a heavy chain comprising three complementarity-determining regions: HCDR1, HCDR2, and HCDR3; and a light chain comprising three complementarity-determining regions: LCDR1, LCDR2, and LCDR3. In some embodiments, the anti-CD30L antibody comprises a HCDR1 comprising SEQ ID NO: 100, a HCDR2 comprising SEQ ID NO: 101, a HCDR3 comprising SEQ ID NO: 102, a LCDR1 comprising SEQ ID NO: 103, a LCDR2 comprising SEQ ID NO: 104, and a LCDR3 comprising SEQ ID NO: 105.

[0110] In some embodiments, the anti-CD30L antibody comprises a HCDR1 comprising SEQ ID NO: 106, a HCDR2 comprising SEQ ID NO: 107, a HCDR3 comprising SEQ ID NO: 108, a LCDR1 comprising SEQ ID NO: 109, a LCDR2 comprising SEQ ID NO: 110, and a LCDR3 comprising SEQ ID NO: 111.

[0111] In some embodiments, the anti-CD30L antibody comprises a HCDR1 comprising SEQ ID NO: 112, a HCDR2 comprising SEQ ID NO: 113, a HCDR3 comprising SEQ ID NO: 114, a LCDR1 comprising SEQ ID NO: 115, a LCDR2 comprising SEQ ID NO: 116, and a LCDR3 comprising SEQ ID NO: 117.

[0112] In some embodiments, the anti-CD30L antibody comprises a HCDR1 comprising SEQ ID NO: 118, a HCDR2 comprising SEQ ID NO: 119, a HCDR3 comprising SEQ ID NO: 120, a LCDR1 comprising SEQ ID NO: 121, a LCDR2 comprising SEQ ID NO: 122, and a LCDR3 comprising SEQ ID NO: 123.

[0113] In some embodiments, the anti-CD30L antibody comprises a HCDR1 comprising SEQ ID NO: 124, a HCDR2 comprising SEQ ID NO: 125, a HCDR3 comprising SEQ ID NO: 126, a LCDR1 comprising SEQ ID NO: 127, a LCDR2 comprising SEQ ID NO: 128, and a LCDR3 comprising SEQ ID NO: 129.

[0114] In some embodiments, the anti-CD30L antibody comprises a HCDR1 comprising SEQ ID NO: 130, a HCDR2 comprising SEQ ID NO: 131, a HCDR3 comprising SEQ ID NO: 132, a LCDR1 comprising SEQ ID NO: 133, a LCDR2 comprising SEQ ID NO: 134, and a LCDR3 comprising SEQ ID NO: 135.

[0115] In some cases, the anti-CD30L antibody comprises a heavy chain (HC) variable domain comprising SEQ ID NO: 136 and a light chain (LC) variable domain comprising SEQ ID NO: 137. In some cases, the anti-CD30L antibody comprises a heavy chain (HC) variable domain comprising SEQ ID NO: 138 and a light chain (LC) variable domain comprising SEQ ID NO: 139. In some cases, the anti-CD30L antibody comprises a heavy chain (HC) variable domain comprising SEQ ID NO: 140 and a light chain (LC) variable domain comprising SEQ ID NO: 141. In some cases, the anti-CD30L antibody comprises a heavy chain (HC) variable domain comprising SEQ ID NO: 142 and a light chain (LC) variable domain comprising SEQ ID NO: 143. In some cases, the anti-CD30L antibody comprises a heavy chain (HC) variable domain comprising SEQ ID NO: 144 and a light chain (LC) variable domain comprising SEQ ID NO: 145. In some cases, the anti-CD30L antibody comprises a heavy chain (HC) variable domain comprising SEQ ID NO: 146 and a light chain (LC) variable domain comprising SEQ ID NO: 154. In some cases, the anti-CD30L antibody comprises a heavy chain (HC) variable domain comprising SEQ ID NO: 147 and a light chain (LC) variable domain comprising SEQ ID NO: 154. In some cases, the anti-CD30L antibody comprises a heavy chain (HC) variable domain comprising SEQ ID NO: 148 and a light chain (LC) variable domain comprising SEQ ID NO: 154. In some cases, the anti-CD30L antibody comprises a heavy chain (HC) variable domain comprising SEQ ID NO: 149 and a light chain (LC) variable domain comprising SEQ ID NO: 154. In some cases, the anti-CD30L antibody comprises a heavy chain (HC) variable domain comprising SEQ ID NO: 150 and a light chain (LC) variable domain comprising SEQ ID NO: 154. In some cases, the anti-CD30L antibody comprises a heavy chain (HC) variable domain comprising SEQ ID NO: 151 and a light chain (LC) variable domain comprising SEQ ID NO: 154. In some cases, the anti-CD30L antibody comprises a heavy chain (HC) variable domain comprising SEQ ID NO: 152 and a light chain (LC) variable domain comprising SEQ ID NO: 154. In some cases, the anti-CD30L antibody comprises a heavy chain (HC) variable domain comprising SEQ ID NO: 153 and a light chain (LC) variable domain comprising SEQ ID NO: 154.

[0116] In some embodiments, the anti-CD30 antibody comprises a heavy chain variable region comprising SEQ ID NO: 19 and a light chain variable region comprising SEQ ID NO: 20. Non-limiting examples of anti-CD30 antibodies include MDX-60, Ber-H2, SGN-30 (cAC10), Ki-4.dgA, HRS-3/A9, AFM13, and H22xKi-4.

[0117] In some embodiments, the CD30L conjugate comprises an anti-CD30L antibody comprising at least one amino acid and a conjugating moiety bound to the at least one 1 amino acid. In some embodiments, the at least one amino acid is located proximal to the N-terminus (e.g., proximal to the N-terminal residue). For example, the at least one amino acid is located optionally within the first 10, 20, 30, 40, or 50 residues from the N-terminus. In some cases, the at least one amino acid is located at the N-terminus (i.e., the at least one amino acid is the N-terminal residue of the CD30L polypeptide). In other embodiments, the at least one amino acid is located proximal to the C-terminus (e.g., proximal to the C-terminal residue). For example, the at least one amino acid is located optionally within the first 10, 20, 30, 40, or 50 residues from the C-terminus. In some cases, the at least one amino acid is located at the C-terminus (i.e., the at least one amino acid is the C-terminal residue of the CD30L polypeptide). In some instances, the CD30L conjugate has an enhanced plasma half-life, such as the half-lives described herein. In some embodiments, the CD30L conjugate is functionally active (e.g., retains activity). In some embodiments, the CD30L conjugate is not functionally active (e.g., devoid of activity). In some embodiments, the conjugating moiety comprises a polymer comprising Polyethylene glycol (PEG). In some embodiments, the conjugating moiety is a drug, such as an additional therapeutic agent disclosed herein. In some embodiments, the anti-CD30 antibody comprises an antibody drug conjugate. As a non-limiting example, the antibody drug conjugate is brentuximab, an anti-CD30 antibody conjugated to monomethyl auristatin E.

### Additional Therapeutic Agents

[0118] Treatments useful with the methods described herein include therapeutic agents that may be used alone, or in combination with an inhibitor of CD30L. In some embodiments, treatment comprises administering a first therapeutic agent and then an inhibitor of CD30L. In some embodiments, treatment comprises administering a first therapeutic agent and an inhibitor of CD30L together. In some embodiments, treatment comprises administering an inhibitor of CD30L and then a first therapeutic agent. The combination therapies may be administered within the same day, or may be administered one or more days, weeks, months, or years apart. In some cases, an inhibitor of CD30L is administered if the subject is determined to be non-responsive to a first line of therapy, e.g., such as TNF inhibitor and/or steroid. Such determination may be made by treatment with the first line therapy and monitoring of disease state and/or diagnostic determination that the subject would be non-responsive to the first line therapy.

[0119] In some embodiments, the therapeutic agent comprises an anti-TNF therapy, e.g., an anti-TNFα therapy. In some embodiments, the therapeutic agent comprises a second-line treatment to an anti-TNF therapy. In some embodiments, the therapeutic agent comprises an immunosuppressant, or a class of drugs that suppress, or reduce, the strength of the immune system. In some embodiments, the immunosuppressant is an antibody. Non-limiting examples of immunosuppressant therapeutic agents include STELARA® (ustekinumab) azathioprine (AZA), 6-mercaptopurine (6-MP), methotrexate, cyclosporin A. (CsA).

[0120] In some embodiments, the therapeutic agent comprises a selective anti-inflammatory drug, or a class of drugs that specifically target pro-inflammatory molecules in the body. In some embodiments, the anti-inflammatory drug comprises an antibody. In some embodiments, the anti-inflammatory drug comprises a small molecule. Non-limiting examples of anti-inflammatory drugs include ENTYVIO (vedolizumab), corticosteroids, aminosalicylates, mesalamine, balsalazide (Colazal) and olsalazine (Dipentum).

[0121] In some embodiments, the therapeutic agent comprises a stem cell therapy. The stem cell therapy may be embryonic or somatic stem cells. The stem cells may be isolated from a donor (allogeneic) or isolated from the subject (autologous). The stem cells may be expanded adipose-derived stem cells (eASCs), hematopoietic stem cells (HSCs), mesenchymal stem (stromal) cells (MSCs), or induced pluripotent stem cells (iPSCs) derived from the cells of the subject. In some embodiments, the therapeutic agent comprises Cx601/Alofisel® (darvadstrocel).

[0122] In some embodiments, the therapeutic agent comprises a small molecule. The small molecule may be used to treat inflammatory diseases or conditions, or fibrostenotic or fibrotic disease. Non-limiting examples of small molecules include Otezla® (apremilast), alicaforsen, or ozanimod (RPC-1063).

[0123] In some embodiments, the therapeutic agent comprises an agonist of Mitogen-Activated Protein Kinase Kinase Kinase Kinase 4 (MAP4K4), Prostaglandin E Receptor 4 (PTGER4), interleukin 18 receptor 1 (IL18R1). 6-Phosphofructo-2-Kinase/Fructose-2,6-Biphosphatase 3 (PFKFB3), Interleukin 18 Receptor Accessory Protein (IL18RAP), Adenylate Cyclase 7 (ADCY7), B Lymphoid Tyrosine Kinase (BLK), G Protein-Coupled Receptor 65 (GPR65), Sprouty Related EVH1 Domain Containing 2 (SPRED2), Src Kinase Associated Phosphoprotein 2 (SKAP2), Receptor Interacting Serine/Threonine Kinase 2 (RIPK2), and TNF Ligand Superfamily Member 15 (TL1A), Janus Kinase 1 (JAK11) G-protein Coupled Receptor 35 (GPR35), Gasdermin B (GSDMB), and gene expression products from genes implicated in the pathogenesis of inflammatory, fibrotic, or fibrostenotic disease. The therapeutic agent may be an allosteric modulator of MAP4K4, PTGER4, IL18R1, PFKFB3, IL18RAP, ADCY7, GPR65, SPRED2, SKAP2, RIPK2, TL1A, JAK11, GPR35, and GSDMB, and gene expression products from genes implicated in the pathogenesis of inflammatory, fibrotic, or fibrostenotic disease.

[0124] In some embodiments, the therapeutic agent comprises an antagonist. The antagonist may comprise an inhibitor of the activity or expression of MAP4K4, PTGER4, IL18R1, PFKFB3, IL18RAP, ADCY7, GPR65, SPRED2, SKAP2, RIPK2, TL1A, JAK1, GPR35, and GSDMB, and gene expression products from genes implicated in the pathogenesis of inflammatory, fibrotic, or fibrostenotic disease. Non-limiting examples of JAK1 inhibitors include Ruxolitinib (INCB018424), S-Ruxolitinib (INCB018424), Baricitinib (LY3009104, INCB028050), Filgotinib (GLPG0634), Momelotinib (CYT387), Cerdulatinib (PRT062070, PRT2070), LY2784544, NVP-BSK805, 2HCl, Tofacitinib (CP-690550, Tasocitinib), XL019, Pacritinib (SB1518), or ZM 39923 HCl.

[0125] In some embodiments the additional therapeutic agent comprises an inhibitor of TL1A expression or activity. In some cases, the inhibitor of TL1A expression or activity is effective to inhibit TL1A-DR3 binding. In some embodiments, the inhibitor of TL1A expression or activity comprises an allosteric modulator of TL1A. An allosteric modulator of TL1A may indirectly influence the effects TL1A on DR3, or TR6/DcR3 on TL1A or DR3. The inhibitor of TL1A expression or activity may be a direct inhibitor or indirect inhibitor. Non-limiting examples of an inhibitor of TL1A expression include RNA to protein TL1A translation inhibitors, antisense oligonucleotides targeting the TNFSF15 mRNA (such as miRNAs, or siRNA), epigenetic editing (such as targeting the DNA-binding domain of TNFSF15, or post-translational modifications of histone tails and/or DNA molecules). Non-limiting examples of an inhibitor of TL1A activity include antagonists to the TL1A receptors, (DR3 and TR6/DcR3), antagonists to TL1A antigen, and antagonists to gene expression products involved in TL1A mediated disease. Antagonists as disclosed herein, may include, but are not limited to, an anti-TL1A antibody, an anti-TL1A-binding antibody fragment, or a small molecule. The small molecule may be a small molecule that binds to TL1A or DR3. The anti-TL1A antibody may be monoclonal or polyclonal. The anti-TL1A antibody may be humanized or chimeric. The anti-TL1A antibody may be a fusion protein. The anti-TL1A antibody may be a blocking anti-TL1A antibody. A blocking antibody blocks binding between two proteins, e.g., a ligand and its receptor. Therefore, a TL1A blocking antibody includes an antibody that prevents binding of TL1A to DR3 or TR6/DcR3 receptors. In a non-limiting example, the TL1A blocking antibody binds to DR3. In another example, the TL1A blocking antibody binds to DcR3. In some cases, the TL1A antibody is an anti-TL1A antibody that specifically binds to TL1A.

[0126] The anti-TL1A antibody may comprise one or more of the antibody sequences of Table 16 and/or Table 17. The anti-DR3 antibody may comprise an amino acid sequence that is at least 85% identical to any one of SEQ ID NOS: 200258-200270 and an amino acid sequence that is at least 85% identical to any one of SEQ ID NOS: 200271-200275. The anti-DR3 antibody may comprise an amino acid sequence comprising the HCDR1, HCDR2, HCDR3 domains of any one of SEQ ID NOS: 200258-200270 and the LCDR1, LCDR2, and LCDR3 domains of any one of SEQ ID NOS: 200271-200275.

[0127] In some embodiments, an anti-TL1A antibody comprises a heavy chain comprising three complementarity-determining regions: HCDR1, HCDR2, and HCDR3; and a light chain comprising three complementarity-determining regions: LCDR1, LCDR2, and LCDR3. In some embodiments, the anti-TL1A antibody comprises a HCDR1 comprising SEQ ID NO: 200109, a HCDR2 comprising SEQ ID NO: 200110, a HCDR3 comprising SEQ ID NO: 200111, a LCDR1 comprising SEQ ID NO: 200112, a LCDR2 comprising SEQ ID NO: 200113, and a LCDR3 comprising SEQ ID NO: 200114. In some cases, the anti-TL1A antibody comprises a heavy chain (HC) variable domain comprising SEQ ID NO: 200115 and a light chain (LC) variable domain comprising SEQ ID NO: 200116.

[0128] In some embodiments, the anti-TL1A antibody comprises a HCDR1 comprising SEQ ID NO: 200117, a HCDR2 comprising SEQ ID NO: 200118, a HCDR3 comprising SEQ ID NO: 200119, a LCDR1 comprising SEQ ID NO: 200120, a LCDR2 comprising SEQ ID NO: 200121, and a LCDR3 comprising SEQ ID NO: 200122. In some cases, the anti-TL1A antibody comprises a heavy chain (HC) variable domain comprising SEQ ID NO: 200123 and a light chain (LC) variable domain comprising SEQ ID NO: 200124.

[0129] In some embodiments, the anti-TL1A antibody comprises a HCDR1 comprising SEQ ID NO: 200125, a HCDR2 comprising SEQ ID NO: 200126, a HCDR3 comprising SEQ ID NO: 200127, a LCDR1 comprising SEQ ID NO: 200128, a LCDR2 comprising SEQ ID NO: 200129, and a LCDR3 comprising SEQ ID NO: 200130. In some cases, the anti-TL1A antibody comprises a heavy chain (HC) variable domain comprising SEQ ID NO: 200131 and a light chain (LC) variable domain comprising SEQ ID NO: 200132.

[0130] In some embodiments, the anti-TL1A antibody comprises a HCDR1 comprising SEQ ID NO: 200133, a HCDR2 comprising SEQ ID NO: 200134, a HCDR3 comprising SEQ ID NO: 200135, a LCDR1 comprising SEQ ID NO: 200139, a LCDR2 comprising SEQ ID NO: 200140, and a LCDR3 comprising SEQ ID NO: 200141. In some cases, the anti-TL1A antibody comprises a HCDR1 comprising SEQ ID NO: 2000136, a HCDR2 comprising SEQ ID NO: 200137, a HCDR3 comprising SEQ ID NO: 200138, a LCDR1 comprising SEQ ID NO: 200139, a LCDR2 comprising SEQ ID NO: 200140, and a LCDR3 comprising SEQ ID NO: 200141. In some cases, the anti-TL1A antibody comprises a heavy chain (HC) variable domain comprising SEQ ID NO: 200142 and a light chain (LC) variable domain comprising SEQ ID NO: 200143. In some cases, the anti-TL1A antibody comprises a heavy chain comprising SEQ ID NO: 200144. In some cases, the anti-TL1A antibody comprises a light chain comprising SEQ ID NO: 200145.

[0131] In some embodiments, the anti-TL1A antibody comprises a HCDR1 comprising SEQ ID NO: 200146, a HCDR2 comprising SEQ ID NO: 200147, a HCDR3 comprising SEQ ID NO: 200148, a LCDR1 comprising SEQ ID NO: 200149, a LCDR2 comprising SEQ ID NO: 200150, and a LCDR3 comprising SEQ ID NO: 200151. In some cases, the anti-TL1A antibody comprises a heavy chain (HC) variable domain comprising SEQ ID NO: 200152 and a light chain (LC) variable domain comprising SEQ ID NO: 200153.

[0132] In some embodiments, the anti-TL1A antibody comprises a HCDR1 comprising SEQ ID NO: 200154, a HCDR2 comprising SEQ ID NO: 200155, a HCDR3 comprising SEQ ID NO: 200156, a LCDR1 comprising SEQ ID NO: 200157, a LCDR2 comprising SEQ ID NO: 200158, and a LCDR3 comprising SEQ ID NO: 200159. In some cases, the anti-TL1A antibody comprises a heavy chain (HC) variable domain comprising SEQ ID NO: 200160 and a light chain (LC) variable domain comprising SEQ ID NO: 200161.

[0133] In some embodiments, the anti-TL1A antibody comprises a HCDR1 comprising SEQ ID NO: 200162, a HCDR2 comprising SEQ ID NO: 200164, a HCDR3 comprising SEQ ID NO: 200165, a LCDR1 comprising SEQ ID NO: 200167, a LCDR2 comprising SEQ ID NO: 200169, and a LCDR3 comprising SEQ ID NO: 200170. In some cases, the anti-TL1A antibody comprises a heavy chain (HC) variable domain comprising SEQ ID NO: 200171 and a light chain (LC) variable domain comprising SEQ ID NO: 200175. In some cases, the anti-TL1A antibody comprises a heavy chain (HC) variable domain comprising SEQ ID NO: 200171 and a light chain (LC) variable domain comprising SEQ ID NO: 200176. In some cases, the anti-TL1A antibody comprises a heavy chain (HC) variable domain comprising SEQ ID NO: 200171 and a light chain (LC) variable domain comprising SEQ ID NO: 200177. In some cases, the anti-TL1A antibody comprises a heavy chain (HC) variable domain comprising SEQ ID NO: 200171 and a light chain (LC) variable domain comprising SEQ ID NO: 200178.

[0134] In some embodiments, the anti-TL1A antibody comprises a HCDR1 comprising SEQ ID NO: 200162, a HCDR2 comprising SEQ ID NO: 200164, a HCDR3 comprising SEQ ID NO: 200165, a LCDR1 comprising SEQ ID NO: 200168, a LCDR2 comprising SEQ ID NO: 200169, and a LCDR3 comprising SEQ ID NO: 200170. In some cases, the anti-TL1A antibody comprises a heavy chain (HC) variable domain comprising SEQ ID NO: 200171 and a light chain (LC) variable domain comprising SEQ ID NO: 200179. In some cases, the anti-TL1A antibody comprises a heavy chain (HC) variable domain comprising SEQ ID NO: 200171 and a light chain (LC) variable domain comprising SEQ ID NO: 200180. In some cases, the anti-TL1A antibody comprises a heavy chain (HC) variable domain comprising SEQ ID NO: 200171 and a light chain (LC) variable domain comprising SEQ ID NO: 200181. In some cases, the anti-TL1A antibody comprises a heavy chain (HC) variable domain comprising SEQ ID NO: 200171 and a light chain (LC) variable domain comprising SEQ ID NO: 200182.

[0135] In some embodiments, the anti-TL1A antibody comprises a HCDR1 comprising SEQ ID NO: 200162, a HCDR2 comprising SEQ ID NO: 200164, a HCDR3 comprising SEQ ID NO: 200165, a LCDR1 comprising SEQ ID NO: 200167, a LCDR2 comprising SEQ ID NO: 200169, and a LCDR3 comprising SEQ ID NO: 200170. In some cases, the anti-TL1A antibody comprises a heavy chain (HC) variable domain comprising SEQ ID NO: 200172 and a light chain (LC) variable domain comprising SEQ ID NO: 200175. In some cases, the anti-TL1A antibody comprises a heavy chain (HC) variable domain comprising SEQ ID NO: 200172 and a light chain (LC) variable domain comprising SEQ ID NO: 200176. In some cases, the anti-TL1A antibody comprises a heavy chain (HC) variable domain comprising SEQ ID NO: 200172 and a light chain (LC) variable domain comprising SEQ ID NO: 200177. In some cases, the anti-TL1A antibody comprises a heavy chain (HC) variable domain comprising SEQ ID NO: 200172 and a light chain (LC) variable domain comprising SEQ ID NO: 200178.

[0136] In some embodiments, the anti-TL1A antibody comprises a HCDR1 comprising SEQ ID NO: 200162, a HCDR2 comprising SEQ ID NO: 200164, a HCDR3 comprising SEQ ID NO: 200165, a LCDR1 comprising SEQ ID NO: 200168, a LCDR2 comprising SEQ ID NO: 200169, and a LCDR3 comprising SEQ ID NO: 200170. In some cases, the anti-TL1A antibody comprises a heavy chain (HC) variable domain comprising SEQ ID NO: 200172 and a light chain (LC) variable domain comprising SEQ ID NO: 200179. In some cases, the anti-TL1A antibody comprises a heavy chain (HC) variable domain comprising SEQ ID NO: 200172 and a light chain (LC) variable domain comprising SEQ ID NO: 200180. In some cases, the anti-TL1A antibody comprises a heavy chain (HC) variable domain comprising SEQ ID NO: 200172 and a light chain (LC) variable domain comprising SEQ ID NO: 200181. In some cases, the anti-TL1A antibody comprises a heavy chain (HC) variable domain comprising SEQ ID NO: 200172 and a light chain (LC) variable domain comprising SEQ ID NO: 200182.

[0137] In some embodiments, the anti-TL1A antibody comprises a HCDR1 comprising SEQ ID NO: 200163, a HCDR2 comprising SEQ ID NO: 200164, a HCDR3 comprising SEQ ID NO: 200166, a LCDR1 comprising SEQ ID NO: 200167, a LCDR2 comprising SEQ ID NO: 200169, and a LCDR3 comprising SEQ ID NO: 200170. In some cases, the anti-TL1A antibody comprises a heavy chain (HC) variable domain comprising SEQ ID NO: 200173 and a light chain (LC) variable domain comprising SEQ ID NO: 200175. In some cases, the anti-TL1A antibody comprises a heavy chain (HC) variable domain comprising SEQ ID NO: 200173 and a light chain (LC) variable domain comprising SEQ ID NO: 200176. In some cases, the anti-TL1A antibody comprises a heavy chain (HC) variable domain comprising SEQ ID NO: 200173 and a light chain (LC) variable domain comprising SEQ ID NO: 200177. In some cases, the anti-TL1A antibody comprises a heavy chain (HC) variable domain comprising SEQ ID NO: 200173 and a light chain (LC) variable domain comprising SEQ ID NO: 200178. In some cases, the anti-TL1A antibody comprises a heavy chain (HC) variable domain comprising SEQ ID NO: 200173 and a light chain (LC) variable domain comprising SEQ ID NO: 200179. In some cases, the anti-TL1A antibody comprises a heavy chain (HC) variable domain comprising SEQ ID NO: 200173 and a light chain (LC) variable domain comprising SEQ ID NO: 200180. In some cases, the anti-TL1A antibody comprises a heavy chain (HC) variable domain comprising SEQ ID NO: 200173 and a light chain (LC) variable domain comprising SEQ ID NO: 200181. In some cases, the anti-TL1A antibody comprises a heavy chain (HC) variable domain comprising SEQ ID NO: 200173 and a light chain (LC) variable domain comprising SEQ ID NO: 200182.

[0138] In some embodiments, the anti-TL1A antibody comprises a HCDR1 comprising SEQ ID NO: 200163, a HCDR2 comprising SEQ ID NO: 200164, a HCDR3 comprising SEQ ID NO: 200166, a LCDR1 comprising SEQ ID NO: 200168, a LCDR2 comprising SEQ ID NO: 200169, and a LCDR3 comprising SEQ ID NO: 200170. In some cases, the anti-TL1A antibody comprises a heavy chain (HC) variable domain comprising SEQ ID NO: 200174 and a light chain (LC) variable domain comprising SEQ ID NO: 200179. In some cases, the anti-TL1A antibody comprises a heavy chain (HC) variable domain comprising SEQ ID NO: 200174 and a light chain (LC) variable domain comprising SEQ ID NO: 200180. In some cases, the anti-TL1A antibody comprises a heavy chain (HC) variable domain comprising SEQ ID NO: 200174 and a light chain (LC) variable domain comprising SEQ ID NO: 200181. In some cases, the anti-TL1A antibody comprises a heavy chain (HC) variable domain comprising SEQ ID NO: 200174 and a light chain (LC) variable domain comprising SEQ ID NO: 200182. In some cases, the anti-TL1A antibody comprises a heavy chain (HC) variable domain comprising SEQ ID NO: 200174 and a light chain (LC) variable domain comprising SEQ ID NO: 200175. In some cases, the anti-TL1A antibody comprises a heavy chain (HC) variable domain comprising SEQ ID NO: 200174 and a light chain (LC) variable domain comprising SEQ ID NO: 200176. In some cases, the anti-TL1A antibody comprises a heavy chain (HC) variable domain comprising SEQ ID NO: 200174 and a light chain (LC) variable domain comprising SEQ ID NO: 200177. In some cases, the anti-TL1A antibody comprises a heavy chain (HC) variable domain comprising SEQ ID NO: 200174 and a light chain (LC) variable domain comprising SEQ ID NO: 200178.

[0139] In some embodiments, the anti-TL1A antibody comprises a HCDR1 comprising SEQ ID NO: 200183, a HCDR2 comprising SEQ ID NO: 200184, a HCDR3 comprising SEQ ID NO: 200185, a LCDR1 comprising SEQ ID NO: 200186, a LCDR2 comprising SEQ ID NO: 200187, and a LCDR3 comprising SEQ ID NO: 200188. In some cases, the anti-TL1A antibody comprises a heavy chain (HC) variable domain comprising SEQ ID NO: 200189 and a light chain (LC) variable domain comprising SEQ ID NO: 200194. In some cases, the anti-TL1A antibody comprises a heavy chain (HC) variable domain comprising SEQ ID NO: 200189 and a light chain (LC) variable domain comprising SEQ ID NO: 200195. In some cases, the anti-TL1A antibody comprises a heavy chain (HC) variable domain comprising SEQ ID NO: 200189 and a light chain (LC) variable domain comprising SEQ ID NO: 200196. In some cases, the anti-TL1A antibody comprises a heavy chain (HC) variable domain comprising SEQ ID NO: 200189 and a light chain (LC) variable domain comprising SEQ ID NO: 200197. In some cases, the anti-TL1A antibody comprises a heavy chain (HC) variable domain comprising SEQ ID NO: 200190 and a light chain (LC) variable domain comprising SEQ ID NO: 200194. In some cases, the anti-TL1A antibody comprises a heavy chain (HC) variable domain comprising SEQ ID NO: 200190 and a light chain (LC) variable domain comprising SEQ ID NO: 200195. In some cases, the anti-TL1A antibody comprises a heavy chain (HC) variable domain comprising SEQ ID NO: 200190 and a light chain (LC) variable domain comprising SEQ ID NO: 200196. In some cases, the anti-TL1A antibody comprises a heavy chain (HC) variable domain comprising SEQ ID NO: 200190 and a light chain (LC) variable domain comprising SEQ ID NO: 200197. In some cases, the anti-TL1A antibody comprises a heavy chain (HC) variable domain comprising SEQ ID NO: 200191 and a light chain (LC) variable domain comprising SEQ ID NO: 200194. In some cases, the anti-TL1A antibody comprises a heavy chain (HC) variable domain comprising SEQ ID NO: 200191 and a light chain (LC) variable domain comprising SEQ ID NO: 200195. In some cases, the anti-TL1A antibody comprises a heavy chain (HC) variable domain comprising SEQ ID NO: 200191 and a light chain (LC) variable domain comprising SEQ ID NO: 200196. In some cases, the anti-TL1A antibody comprises a heavy chain (HC) variable domain comprising SEQ ID NO: 200191 and a light chain (LC) variable domain comprising SEQ ID NO: 200197. In some cases, the anti-TL1A antibody comprises a heavy chain (HC) variable domain comprising SEQ ID NO: 200192 and a light chain (LC) variable domain comprising SEQ ID NO: 200194. In some cases, the anti-TL1A antibody comprises a heavy chain (HC) variable domain comprising SEQ ID NO: 200192 and a light chain (LC) variable domain comprising SEQ ID NO: 200195. In some cases, the anti-TL1A antibody comprises a heavy chain (HC) variable domain comprising SEQ ID NO: 200192 and a light chain (LC) variable domain comprising SEQ ID NO: 200196. In some cases, the anti-TL1A antibody comprises a heavy chain (HC) variable domain comprising SEQ ID NO: 200192 and a light chain (LC) variable domain comprising SEQ ID NO: 200197. In some cases, the anti-TL1A antibody comprises a heavy chain (HC) variable domain comprising SEQ ID NO: 200193 and a light chain (LC) variable domain comprising SEQ ID NO: 200194. In some cases, the anti-TL1A antibody comprises a heavy chain (HC) variable domain comprising SEQ ID NO: 200193 and a light chain (LC) variable domain comprising SEQ ID NO: 200195. In some cases, the anti-TL1A antibody comprises a heavy chain (HC) variable domain comprising SEQ ID NO: 200193 and a light chain (LC) variable domain comprising SEQ ID NO: 200196. In some cases, the anti-TL1A antibody comprises a heavy chain (HC) variable domain comprising SEQ ID NO: 200193 and a light chain (LC) variable domain comprising SEQ ID NO: 200197.

[0140] In some embodiments, the anti-TL1A antibody comprises a HCDR1 comprising SEQ ID NO: 200198, a HCDR2 comprising SEQ ID NO: 200199, a HCDR3 comprising SEQ ID NO: 200200, a LCDR1 comprising SEQ ID NO: 200201, a LCDR2 comprising SEQ ID NO: 200202, and a LCDR3 comprising SEQ ID NO: 200203. In some cases, the anti-TL1A antibody comprises a heavy chain (HC) variable domain comprising SEQ ID NO: 200204 and a light chain (LC) variable domain comprising SEQ ID NO: 200205. In some cases, the anti-TL1A antibody comprises a heavy chain (HC) variable domain comprising SEQ ID NO: 200206 and a light chain (LC) variable domain comprising SEQ ID NO: 200207. In some cases, the anti-TL1A antibody comprises a heavy chain (HC) variable domain comprising SEQ ID NO: 200208 and a light chain (LC) variable domain comprising SEQ ID NO: 200209. In some cases, the anti-TL1A antibody comprises a heavy chain (HC) variable domain comprising SEQ ID NO: 200210 and a light chain (LC) variable domain comprising SEQ ID NO: 200211. In some cases, the anti-TL1A antibody comprises a heavy chain (HC) variable domain comprising SEQ ID NO: 200212 and a light chain (LC) variable domain comprising SEQ ID NO: 200213. In some cases, the anti-TL1A antibody comprises a heavy chain (HC) variable domain comprising SEQ ID NO: 200214 and a light chain (LC) variable domain comprising SEQ ID NO: 200215. In some cases, the anti-TL1A antibody comprises a heavy chain (HC) variable domain comprising SEQ ID NO: 200216 and a light chain (LC) variable domain comprising SEQ ID NO: 200217. In some cases, the anti-TL1A antibody comprises a heavy chain (HC) variable domain comprising SEQ ID NO: 200218 and a light chain (LC) variable domain comprising SEQ ID NO: 200219. In some cases, the anti-TL1A antibody comprises a heavy chain (HC) variable domain comprising SEQ ID NO: 200220 and a light chain (LC) variable domain comprising SEQ ID NO: 200221. In some cases, the anti-TL1A antibody comprises a heavy chain (HC) variable domain comprising SEQ ID NO: 200222 and a light chain (LC) variable domain comprising SEQ ID NO: 200223. In some cases, the anti-TL1A antibody comprises a heavy chain (HC) variable domain comprising SEQ ID NO: 200224 and a light chain (LC) variable domain comprising SEQ ID NO: 200225. In some cases, the anti-TL1A antibody comprises a heavy chain (HC) variable domain comprising SEQ ID NO: 200226 and a light chain (LC) variable domain comprising SEQ ID NO: 200227.

[0141] In some embodiments, the anti-TL1A antibody comprises a HCDR1 comprising SEQ ID NO: 200228, a HCDR2 comprising SEQ ID NO: 200229, a HCDR3 comprising SEQ ID NO: 200230, a LCDR1 comprising SEQ ID NO: 200231, a LCDR2 comprising SEQ ID NO: 200232, and a LCDR3 comprising SEQ ID NO: 200233. In some cases, the anti-TL1A antibody comprises a heavy chain (HC) variable domain comprising SEQ ID NO: 200234 and a light chain (LC) variable domain comprising SEQ ID NO: 200235.

[0142] In some embodiments, the anti-TL1A antibody comprises a HCDR1 comprising SEQ ID NO: 200236, a HCDR2 comprising SEQ ID NO: 200237, a HCDR3 comprising SEQ ID NO: 200238, a LCDR1 comprising SEQ ID NO: 200239, a LCDR2 comprising SEQ ID NO: 200240, and a LCDR3 comprising SEQ ID NO: 200241. In some cases, the anti-TL1A antibody comprises a heavy chain (HC) variable domain comprising SEQ ID NO: 200242 and a light chain (LC) variable domain comprising SEQ ID NO: 200243.

[0143] In some embodiments, the anti-TL1A antibody comprises a HCDR1 comprising SEQ ID NO: 200246, a HCDR2 comprising SEQ ID NO: 200247, a HCDR3 comprising SEQ ID NO: 200248, a LCDR1 comprising SEQ ID NO: 200249, a LCDR2 comprising SEQ ID NO: 200250, and a LCDR3 comprising SEQ ID NO: 200251. In some cases, the anti-TL1A antibody comprises a heavy chain (HC) variable domain comprising SEQ ID NO: 200244 and a light chain (LC) variable domain comprising SEQ ID NO: 200245. In some cases, the anti-TL1A antibody comprises a heavy chain (HC) variable domain comprising SEQ ID NO: 200252 and a light chain (LC) variable domain comprising SEQ ID NO: 200253. In some cases, the anti-TL1A antibody comprises a heavy chain (HC) variable domain comprising SEQ ID NO: 200254 and a light chain (LC) variable domain comprising SEQ ID NO: 200255. In some cases, the anti-TL1A antibody comprises a heavy chain (HC) variable domain comprising SEQ ID NO: 200256 and a light chain (LC) variable domain comprising SEQ ID NO: 200257.

[0144] In some embodiments, the anti-TL1A antibody comprises a HCDR1 comprising SEQ ID NO: 200276, a HCDR2 comprising SEQ ID NO: 200277, a HCDR3 comprising SEQ ID NO: 200278, a LCDR1 comprising SEQ ID NO: 200279, a LCDR2 comprising SEQ ID NO: 200280, and a LCDR3 comprising SEQ ID NO: 200281. In some cases, the anti-TL1A antibody comprises a heavy chain (HC) variable domain comprising SEQ ID NO: 200282 and a light chain (LC) variable domain comprising SEQ ID NO: 200283.

[0145] In some embodiments, the anti-TL1A antibody comprises a HCDR1 comprising SEQ ID NO: 200284, a HCDR2 comprising SEQ ID NO: 200285, a HCDR3 comprising SEQ ID NO: 200286, a LCDR1 comprising SEQ ID NO: 200287, a LCDR2 comprising SEQ ID NO: 200288, and a LCDR3 comprising SEQ ID NO: 200299. In some cases, the anti-TL1A antibody comprises a heavy chain (HC) variable domain comprising SEQ ID NO: 200290 and a light chain (LC) variable domain comprising SEQ ID NO: 200291.

[0146] In some embodiments, the anti-TL1A antibody comprises one or more of A101-A177 of Table 15. In some embodiments, the anti-TL1A antibody is A100. In some embodiments, the anti-TL1A antibody is A101. In some embodiments, the anti-TL1A antibody is A102. In some embodiments, the anti-TL1A antibody is A103. In some embodiments, the anti-TL1A antibody is A104. In some embodiments, the anti-TL1A antibody is A105. In some embodiments, the anti-TL1A antibody is A106. In some embodiments, the anti-TL1A antibody is A107. In some embodiments, the anti-TL1A antibody is A108. In some embodiments, the anti-TL1A antibody is A109. In some embodiments, the anti-TL1A antibody is A110. In some embodiments, the anti-TL1A antibody is A111. In some embodiments, the anti-TL1A antibody is A112. In some embodiments, the anti-TL1A antibody is A113. In some embodiments, the anti-TL1A antibody is A114. In some embodiments, the anti-TL1A antibody is A115. In some embodiments, the anti-TL1A antibody is A116. In some embodiments, the anti-TL1A antibody is A117. In some embodiments, the anti-TL1A antibody is A118. In some embodiments, the anti-TL1A antibody is A119. In some embodiments, the anti-TL1A antibody is A120. In some embodiments, the anti-TL1A antibody is A121. In some embodiments, the anti-TL1A antibody is A122. In some embodiments, the anti-TL1A antibody is A123. In some embodiments, the anti-TL1A antibody is A124. In some embodiments, the anti-TL1A antibody is A125. In some embodiments, the anti-TL1A antibody is A126. In some embodiments, the anti-TL1A antibody is A127. In some embodiments, the anti-TL1A antibody is A128. In some embodiments, the anti-TL1A antibody is A129. In some embodiments, the anti-TL1A antibody is A130. In some embodiments, the anti-TL1A antibody is A131. In some embodiments, the anti-TL1A antibody is A132. In some embodiments, the anti-TL1A antibody is A133. In some embodiments, the anti-TL1A antibody is A134. In some embodiments, the anti-TL1A antibody is A135. In some embodiments, the anti-TL1A antibody is A136. In some embodiments, the anti-TL1A antibody is A137. In some embodiments, the anti-TL1A antibody is A138. In some embodiments, the anti-TL1A antibody is A139. In some embodiments, the anti-TL1A antibody is A140. In some embodiments, the anti-TL1A antibody is A141. In some embodiments, the anti-TL1A antibody is A142. In some embodiments, the anti-TL1A antibody is A143. In some embodiments, the anti-TL1A antibody is A144. In some embodiments, the anti-TL1A antibody is A145. In some embodiments, the anti-TL1A antibody is A146. In some embodiments, the anti-TL1A antibody is A147. In some embodiments, the anti-TL1A antibody is A148. In some embodiments, the anti-TL1A antibody is A149. In some embodiments, the anti-TL1A antibody is A150. In some embodiments, the anti-TL1A antibody is A151. In some embodiments, the anti-TL1A antibody is A152. In some embodiments, the anti-TL1A antibody is A153. In some embodiments, the anti-TL1A antibody is A154. In some embodiments, the anti-TL1A antibody is A155. In some embodiments, the anti-TL1A antibody is A156. In some embodiments, the anti-TL1A antibody is A157. In some embodiments, the anti-TL1A antibody is A158. In some embodiments, the anti-TL1A antibody is A159. In some embodiments, the anti-TL1A antibody is A160. In some embodiments, the anti-TL1A antibody is A161. In some embodiments, the anti-TL1A antibody is A162. In some embodiments, the anti-TL1A antibody is A163. In some embodiments, the anti-TL1A antibody is A164. In some embodiments, the anti-TL1A antibody is A165. In some embodiments, the anti-TL1A antibody is A166. In some embodiments, the anti-TL1A antibody is A167. In some embodiments, the anti-TL1A antibody is A168. In some embodiments, the anti-TL1A antibody is A169. In some embodiments, the anti-TL1A antibody is A170. In some embodiments, the anti-TL1A antibody is A171. In some embodiments, the anti-TL1A antibody is A172. In some embodiments, the anti-TL1A antibody is A173. In some embodiments, the anti-TL1A antibody is A174. In some embodiments, the anti-TL1A antibody is A175. In some embodiments, the anti-TL1A antibody is A176. In some embodiments, the anti-TL1A antibody is A177.

[0147] In some embodiments, the anti-DR3 is A178. In some embodiments, the anti-DR3 is A179. In some embodiments, the anti-DR3 is A180. In some embodiments, the anti-DR3 is A181. In some embodiments, the anti-DR3 is A182. In some embodiments, the anti-DR3 is A183. In some embodiments, the anti-DR3 is A184. In some embodiments, the anti-DR3 is A185. In some embodiments, the anti-DR3 is A186. In some embodiments, the anti-DR3 is A187. In some embodiments, the anti-DR3 is A188. In some embodiments, the anti-DR3 is A189. In some embodiments, the anti-DR3 is A190. In some embodiments, the anti-DR3 is A191. In some embodiments, the anti-DR3 is A192. In some embodiments, the anti-DR3 is A193. In some embodiments, the anti-DR3 is A194. In some embodiments, the anti-DR3 is A195. In some embodiments, the anti-DR3 is A196. In some embodiments, the anti-DR3 is A197. In some embodiments, the anti-DR3 is A198. In some embodiments, the anti-DR3 is A199. In some embodiments, the anti-DR3 is A200. In some embodiments, the anti-DR3 is A201. In some embodiments, the anti-DR3 is A202. In some embodiments, the anti-DR3 is A203. In some embodiments, the anti-DR3 is A204. In some embodiments, the anti-DR3 is A205. In some embodiments, the anti-DR3 is A206. In some embodiments, the anti-DR3 is A207. In some embodiments, the anti-DR3 is A208. In some embodiments, the anti-DR3 is A209. In some embodiments, the anti-DR3 is A210. In some embodiments, the anti-DR3 is A211. In some embodiments, the anti-DR3 is A212. In some embodiments, the anti-DR3 is A213. In some embodiments, the anti-DR3 is A214. In some embodiments, the anti-DR3 is A215. In some embodiments, the anti-DR3 is A216. In some embodiments, the anti-DR3 is A217. In some embodiments, the anti-DR3 is A218. In some embodiments, the anti-DR3 is A219. In some embodiments, the anti-DR3 is A220. In some embodiments, the anti-DR3 is A221. In some embodiments, the ani-DR3 is A222. In some embodiments, the ant-DR3 is A223. In some embodiments, the anti-DR3 is A224. In some embodiments, the anti-DR3 is A225. In some embodiments, the anti-DR3 is A226. In some embodiments, the anti-DR3 is A227. In some embodiments, the anti-DR3 is A228. In some embodiments, the anti-DR3 is A229. In some embodiments, the anti-DR3 is A230. In some embodiments, the anti-DR3 is A231. In some embodiments, the anti-DR3 is A232. In some embodiments, the anti-DR3 is A233. In some embodiments, the anti-DR3 is A234. In some embodiments, the anti-DR3 is A235. In some embodiments, the anti-DR3 is A236. In some embodiments, the anti-DR3 is A237. In some embodiments, the anti-DR3 is A238. In some embodiments, the anti-DR3 is A239. In some embodiments, the anti-DR3 is A240. In some embodiments, the anti-DR3 is A241. In some embodiments, the anti-DR3 is A242.

TABLE 15
Non-Limiting Examples of anti-TL1A and anti-DR3 Antibodies

| | HC Variable Domain | LC Variable Domain |
|---|---|---|
| Antibody Name | (SEQ ID NO) | (SEQ ID NO) |
| A100 | 200115 | 200116 |
| A101 | 200123 | 200124 |
| A102 | 200131 | 200132 |
| A103 | 200142 | 200143 |
| A104 | 200152 | 200153 |
| A105 | 200160 | 200161 |
| A106 | 200171 | 200175 |
| A107 | 200171 | 200176 |
| A108 | 200171 | 200177 |
| A109 | 200171 | 200178 |
| A110 | 200171 | 200179 |
| A111 | 200171 | 200180 |
| A112 | 200171 | 200181 |
| A113 | 200171 | 200182 |
| A114 | 200172 | 200175 |
| A115 | 200172 | 200176 |
| A116 | 200172 | 200177 |
| A117 | 200172 | 200178 |
| A118 | 200172 | 200179 |
| A119 | 200172 | 200180 |
| A120 | 200172 | 200181 |
| A121 | 200172 | 200182 |
| A122 | 200173 | 200175 |
| A123 | 200173 | 200176 |
| A124 | 200173 | 200177 |
| A125 | 200173 | 200178 |
| A126 | 200173 | 200179 |
| A127 | 200173 | 200180 |
| A128 | 200173 | 200181 |
| A129 | 200173 | 200182 |
| A130 | 200174 | 200175 |
| A131 | 200174 | 200176 |
| A132 | 200174 | 200177 |
| A133 | 200174 | 200178 |
| A134 | 200174 | 200179 |
| A135 | 200174 | 200180 |
| A136 | 200174 | 200181 |
| A137 | 200174 | 200182 |
| A138 | 200189 | 200194 |
| A139 | 200189 | 200195 |
| A140 | 200189 | 200196 |
| A141 | 200189 | 200197 |
| A142 | 200190 | 200194 |
| A143 | 200190 | 200195 |
| A144 | 200190 | 200196 |
| A145 | 200190 | 200197 |
| A146 | 200191 | 200194 |
| A147 | 200191 | 200195 |
| A148 | 200191 | 200196 |
| A149 | 200191 | 200197 |
| A150 | 200192 | 200194 |
| A151 | 200192 | 200195 |
| A152 | 200192 | 200196 |
| A153 | 200192 | 200197 |
| A154 | 200193 | 200194 |
| A155 | 200193 | 200195 |
| A156 | 200193 | 200196 |
| A157 | 200193 | 200197 |
| A158 | 200204 | 200205 |
| A159 | 200206 | 200207 |
| A160 | 200208 | 200209 |
| A161 | 200210 | 200211 |
| A162 | 200212 | 200213 |
| A163 | 200214 | 200215 |
| A164 | 200216 | 200217 |
| A165 | 200218 | 200219 |
| A166 | 200220 | 200221 |
| A167 | 200222 | 200223 |
| A168 | 200224 | 200225 |
| A169 | 200226 | 200227 |
| A170 | 200234 | 200235 |
| A171 | 200242 | 200243 |
| A172 | 200244 | 200245 |
| A173 | 200252 | 200253 |
| A174 | 200254 | 200255 |
| A175 | 200256 | 200257 |
| A176 | 200282 | 200283 |
| A177 | 200290 | 200291 |
| A178 | 200258 | 200271 |
| A179 | 200258 | 200272 |
| A180 | 200258 | 200273 |
| A181 | 200258 | 200274 |
| A182 | 200258 | 200275 |
| A183 | 200259 | 200271 |
| A184 | 200259 | 200272 |
| A185 | 200259 | 200273 |
| A186 | 200259 | 200274 |
| A187 | 200259 | 200275 |
| A188 | 200260 | 200271 |
| A189 | 200260 | 200272 |
| A190 | 200260 | 200273 |
| A191 | 200260 | 200274 |
| A192 | 200260 | 200275 |
| A193 | 200261 | 200271 |
| A194 | 200261 | 200272 |
| A195 | 200261 | 200273 |
| A196 | 200261 | 200274 |
| A197 | 200261 | 200275 |
| A198 | 200262 | 200271 |
| A199 | 200262 | 200272 |
| A200 | 200262 | 200273 |
| A201 | 200262 | 200274 |
| A202 | 200262 | 200275 |
| A203 | 200263 | 200271 |
| A204 | 200263 | 200272 |
| A205 | 200263 | 200273 |
| A206 | 200263 | 200274 |
| A207 | 200263 | 200275 |
| A208 | 200264 | 200271 |
| A209 | 200264 | 200272 |
| A210 | 200264 | 200273 |
| A211 | 200264 | 200274 |
| A212 | 200264 | 200275 |
| A213 | 200265 | 200271 |
| A214 | 200265 | 200272 |
| A215 | 200265 | 200273 |
| A216 | 200265 | 200274 |
| A217 | 200265 | 200275 |
| A218 | 200266 | 200271 |
| A219 | 200266 | 200272 |
| A220 | 200266 | 200273 |
| A221 | 200266 | 200274 |
| A222 | 200266 | 200275 |
| A223 | 200267 | 200271 |
| A224 | 200267 | 200272 |
| A225 | 200267 | 200273 |
| A226 | 200267 | 200274 |
| A227 | 200267 | 200275 |
| A228 | 200268 | 200271 |
| A229 | 200268 | 200272 |
| A230 | 200268 | 200273 |
| A231 | 200268 | 200274 |
| A232 | 200268 | 200275 |
| A233 | 200269 | 200271 |
| A234 | 200269 | 200272 |
| A235 | 200269 | 200273 |
| A236 | 200269 | 200274 |
| A237 | 200269 | 200275 |
| A238 | 200270 | 200271 |
| A239 | 200270 | 200272 |
| A240 | 200270 | 200273 |
| A241 | 200270 | 200274 |
| A242 | 200270 | 200275 |

[0148] In some cases, the anti-TL1A antibody binds to at least one or more of the same residues of human TL1A as an antibody described herein. For example, the anti-TL1A antibody binds to at least one or more of the same residues of human TL1A as an antibody selected from A100-A177 of Table 17. In some cases, the anti-TL1A antibody binds to the same epitope of human TL1A as an antibody selected from A100-A177. In some cases, the anti-TL1A antibody binds to the same region of human TL1A as an antibody selected from A100-A177.

[0149] In certain embodiments, the anti-TL1A antibody or antigen binding fragment comprises (a) a heavy chain variable region comprising an amino acid sequence at least about 85%, 90%, 95%, 97%, 98%, 99%, or 100% identical to any one of SEQ ID NOs: 491, 493, 495, 497, 499, 501, 503, 505, 507, 509, 511, 513, 515, 517, 519, 521, 523, 525, 527, 529, 531, 533, 535, 537, 539, or 541; and (b) a light chain variable region comprising an amino acid sequence at least about 85%, 90%, 95%, 97%, 98%, 99%, or 100% identical to any one of SEQ ID NOs: 490, 492, 494, 496, 498, 500, 502, 504, 506, 508, 510, 512, 514, 516, 518, 520, 522, 524, 526, 528, 530, 532, 534, 536, 538, or 540.

[0150] In some embodiments, the anti-TL1A antibody comprises any one of the following embodiments 1-547 below.
[0151] 1. An antibody or antigen-binding fragment that specifically binds to TL1A, comprising:
[0152] a heavy chain variable region comprising four heavy chain framework regions (HFR1, HFR2, HFR3, and HFR4), and three heavy chain complementarity-determining regions (HCDR1, HCDR2, and HCDR3), the heavy chain variable region comprising:
   [0153] (a) a HFR1 selected from: (i) a HFR1 comprising SEQ ID NO: 100100, (ii) a HFR1 comprising SEQ ID NO: 100108, and (iii) a HFR1 comprising an amino acid sequence that differs from a sequence selected from the group consisting of SEQ ID NOS: 100100 and 100108 by up to five, four, three, or two amino acids,
   [0154] (b) a HFR2 selected from: (i) a HFR2 comprising SEQ ID NO: 100101, and (ii) a HFR2 comprising an amino acid sequence that differs from SEQ ID NO: 100101 by up to five, four, three, or two amino acids,
   [0155] (c) a HFR3 selected from: (i) a HFR3 comprising SEQ ID NO: 100102, (ii) a HFR3 comprising SEQ ID NO: 100109, and (iii) a HFR3 comprising an amino acid sequence that differs from a sequence selected from the group consisting of SEQ ID NOS: 100102 and 100109 by up to five, four, three, or two amino acids,
   [0156] (d) a HFR4 selected from: (i) a HFR4 comprising SEQ ID NO: 100103, and (ii) a HFR4 comprising an amino acid sequence that differs from SEQ ID NO: 100103 by up to five, four, three, or two amino acids,
   [0157] (e) a HCDR1 selected from: (i) a HCDR1 comprising SEQ ID NO: 1009, (ii) a HCDR1 comprising SEQ ID NO: 100150, wherein X₁ is selected from D and E, X₂ is selected from I, P and V, X₃ is selected from G, Q, S, and V, X₄ is selected from F and Y, and X₅ is selected from I and M, (iii) a HCDR1 selected from SEQ ID NOS: 100200-100295, and (iv) a HCDR1 comprising an amino acid sequence that differs from a sequence selected from the group consisting of SEQ ID NOS: 1009, 100150 and 100200-295 by up to five, four, three, or two amino acids,
   [0158] (f) a HCDR2 selected from: (i) a HCDR2 comprising SEQ ID NO: 10012, and (ii) a HCDR2 comprising an amino acid sequence that differs from SEQ ID NO: 10012 by up to five, four, three, or two amino acids, and
   [0159] (g) a HCDR3 selected from (i) a HCDR3 comprising SEQ ID NO: 10015, (ii) a HCDR3 comprising SEQ ID NO: 100152, wherein X₁ is selected from L and M, and X₂ is selected from E, I, K, L, M, Q, T, V, W, and Y, (iii) a HCDR3 selected from SEQ ID NOS: 100296-100314, and (iv) a HCDR3 comprising an amino acid sequence that differs from a sequence selected from the group consisting of SEQ ID NOS: 10015, 100152 and 100296-100314 by up to five, four, three, or two amino acids; and
[0160] a light chain variable region comprising four light chain framework regions (LFR1, LFR2, LFR3, and LFR4), and three light chain complementarity-determining regions (LCDR1, LCDR2, and LCDR3), the light chain variable region comprising:
   [0161] (a) a LFR1 selected from: (i) a LFR1 comprising SEQ ID NO: 100104, and (ii) a LFR1 comprising an amino acid sequence that differs from SEQ ID NO: 100104 by up to five, four, three, or two amino acids,
   [0162] (b) a LFR2 selected from: (i) a LFR2 comprising SEQ ID NO: 100105, and (ii) a LFR2 comprising an amino acid sequence that differs from SEQ ID NO: 100105 by up to five, four, three, or two amino acids,
   [0163] (c) a LFR3 selected from: (i) a LFR3 comprising SEQ ID NO: 100106, (ii) a LFR3 comprising SEQ ID NO: 100110, and (iii) a LFR3 comprising an amino acid sequence that differs from a sequence selected from the group consisting of SEQ ID NOS: 100106 and 100110 by up to five, four, three, or two amino acids,
   [0164] (d) a LFR4 selected from: (i) a LFR4 comprising SEQ ID NO: 100107, and (ii) a LFR4 comprising an amino acid sequence that differs from SEQ ID NO: 100107 by up to five, four, three, or two amino acids,
   [0165] (e) a LCDR1 selected from: (i) a LCDR1 comprising SEQ ID NO: 10018, and (ii) a LCDR1 comprising an amino acid sequence that differs from SEQ ID NO: 10018 by up to five, four, three, or two amino acids,
   [0166] (f) a LCDR2 selected from: (i) a LCDR2 comprising SEQ ID NO: 10021, and (ii) a LCDR2 comprising an amino acid sequence that differs from SEQ ID NO: 10021 by up to five, four, three, or two amino acids, and
   [0167] (g) a LCDR3 selected from (i) a LCDR3 comprising SEQ ID NO: 10024, (ii) a LCDR3 comprising SEQ ID NO: 100155, wherein X₁ is selected from Q and N, X₂ is selected from D, E, H, N, Q, and S, X₃ is selected from A and G, and X₄ is selected from D, F, K, N, R, S, and T, (iii) a LCDR3 selected from SEQ ID NOS: 100315-100482, and
   [0168] (iv) a LCDR3 comprising an amino acid sequence that differs from a sequence selected from the group consisting of SEQ ID NOS: 10024, 100155, and 100315-100482 by up to five, four, three, or two amino acids.
[0169] 2. The antibody or antigen-binding fragment of embodiment 1, provided that the HFR1 comprises SEQ ID NO: 100100.
[0170] 3. The antibody or antigen-binding fragment of embodiment 1, provided that the HFR1 comprises SEQ ID NO: 100108.
[0171] 4. The antibody or antigen-binding fragment of embodiment 1, provided that the HFR1 comprises an amino acid sequence that differs from SEQ ID NO: 100100 by up to five, four, three, or two amino acids.
[0172] 5. The antibody or antigen-binding fragment of embodiment 1, provided that the HFR1 comprises an amino acid sequence that differs from SEQ ID NO: 100108 by up to five, four, three, or two amino acids.
[0173] 6. The antibody or antigen-binding fragment of any of embodiments 1-5, provided that the HFR2 comprises SEQ ID NO: 100101.
[0174] 7. The antibody or antigen-binding fragment of any of embodiments 1-5, provided that the HFR2 comprises an amino acid sequence that differs from SEQ ID NO: 100101 by up to five, four, three, or two amino acids.
[0175] 8. The antibody or antigen-binding fragment of any of embodiments 1-7, provided that the HFR3 comprises SEQ ID NO: 100102.
[0176] 9. The antibody or antigen-binding fragment of any of embodiments 1-7, provided that the HFR3 comprises SEQ ID NO: 100109.
[0177] 10. The antibody or antigen-binding fragment of any of embodiments 1-7, provided that the HFR3 comprises an amino acid sequence that differs from SEQ ID NO: 100102 by up to five, four, three, or two amino acids.
[0178] 11. The antibody or antigen-binding fragment of any of embodiments 1-7, provided that the HFR3 comprises an amino acid sequence that differs from SEQ ID NO: 100109 by up to five, four, three, or two amino acids.
[0179] 12. The antibody or antigen-binding fragment of any of embodiments 1-11, provided that the HFR4 comprises SEQ ID NO: 100103.
[0180] 13. The antibody or antigen-binding fragment of any of embodiments 1-11, provided that the HFR4 comprises an amino acid sequence that differs from SEQ ID NO: 100103 by up to five, four, three, or two amino acids.
[0181] 14. The antibody or antigen-binding fragment of any of embodiments 1-13, provided that the HCDR1 comprises SEQ ID NO: 1009.
[0182] 15. The antibody or antigen-binding fragment of any of embodiments 1-13, provided that the HCDR1 comprises SEQ ID NO: 100150.
[0183] 16. The antibody or antigen-binding fragment of embodiment 15, provided that X₁ is E.
[0184] 17. The antibody or antigen-binding fragment of embodiment 15 or embodiment 16, provided that X₂ is selected from P and V.
[0185] 18. The antibody or antigen-binding fragment of any of embodiments 15-17, provided that X₃ is selected from G, S, and V.
[0186] 19. The antibody or antigen-binding fragment of any of embodiments 15-18, provided that X₄ is F.
[0187] 20. The antibody or antigen-binding fragment of any of embodiments 15-19, provided that X₅ is I.
[0188] 21. The antibody or antigen-binding fragment of any of embodiments 1-13, provided that the HCDR1 comprises an amino acid sequence selected from SEQ ID NOS: 100200-100295.
[0189] 22. The antibody or antigen-binding fragment of any of embodiments 1-21, provided that the HCDR2 comprises SEQ ID NO: 10012.
[0190] 23. The antibody or antigen-binding fragment of any of embodiments 1-21, provided that the HCDR2 comprises an amino acid sequence that differs from SEQ ID NO: 10012 by up to five, four, three, or two amino acids.
[0191] 24. The antibody or antigen-binding fragment of any of embodiments 1-23, provided that the HCDR3 comprises SEQ ID NO: 10015.
[0192] 25. The antibody or antigen-binding fragment of any of embodiments 1-23, provided that the HCDR3 comprises SEQ ID NO: 100152.
[0193] 26. The antibody or antigen-binding fragment of embodiment 25, provided that X₁ is M.
[0194] 27. The antibody or antigen-binding fragment of embodiment 25 or embodiment 26, provided that X₂ is selected from E, I, K, L, M, Q, T, W, and Y.
[0195] 28. The antibody or antigen-binding fragment of any of embodiments 1-23, provided that the HCDR3 comprises a sequence selected from SEQ ID NOS: 100296-100314.
[0196] 29. The antibody or antigen-binding fragment of any of embodiments 1-28, provided that the LFR1 comprises SEQ ID NO: 100104.
[0197] 30. The antibody or antigen-binding fragment of any of embodiments 1-28, provided that the LFR1 comprises an amino acid sequence that differs from SEQ ID NO: 100104 by up to five, four, three, or two amino acids.
[0198] 31. The antibody or antigen-binding fragment of any of embodiments 1-30, provided that the LFR2 comprises SEQ ID NO: 100105.
[0199] 32. The antibody or antigen-binding fragment of any of embodiments 1-30, provided that the LFR2 comprises an amino acid sequence that differs from SEQ ID NO: 100105 by up to five, four, three, or two amino acids.
[0200] 33. The antibody or antigen-binding fragment of any of embodiments 1-32, provided that the LFR3 comprises SEQ ID NO: 100106.
[0201] 34. The antibody or antigen-binding fragment of any of embodiments 1-32, provided that the LFR3 comprises SEQ ID NO: 100110.
[0202] 35. The antibody or antigen-binding fragment of any of embodiments 1-32, provided that the LFR3 comprises an amino acid sequence that differs from SEQ ID NO: 100106 by up to five, four, three, or two amino acids.
[0203] 36. The antibody or antigen-binding fragment of any of embodiments 1-32, provided that the LFR3 comprises an amino acid sequence that differs from SEQ ID NO: 100110 by up to five, four, three, or two amino acids.
[0204] 37. The antibody or antigen-binding fragment of any of embodiments 1-36, provided that the LFR4 comprises SEQ ID NO: 100107.
[0205] 38. The antibody or antigen-binding fragment of any of embodiments 1-36, provided that the LFR4 comprises an amino acid sequence that differs from SEQ ID NO: 100107 by up to five, four, three, or two amino acids.
[0206] 39. The antibody or antigen-binding fragment of any of embodiments 1-38, provided that the LCDR1 comprises SEQ ID NO: 10018.
[0207] 40. The antibody or antigen-binding fragment of any of embodiments 1-38, provided that the LCDR1 comprises an amino acid sequence that differs from SEQ ID NO: 10018 by up to five, four, three, or two amino acids.
[0208] 41. The antibody or antigen-binding fragment of any of embodiments 1-40, provided that the LCDR2 comprises SEQ ID NO: 10021.
[0209] 42. The antibody or antigen-binding fragment of any of embodiments 1-40, provided that the LCDR2 comprises an amino acid sequence that differs from SEQ ID NO: 10021 by up to five, four, three, or two amino acids.
[0210] 43. The antibody or antigen-binding fragment of any of embodiments 1-42, provided that the LCDR3 comprises SEQ ID NO: 10024.
[0211] 44. The antibody or antigen-binding fragment of any of embodiments 1-42, provided that the LCDR3 comprises SEQ ID NO: 100155.
[0212] 45. The antibody or antigen-binding fragment of embodiment 44, provided that X₁ is N.
[0213] 46. The antibody or antigen-binding fragment of embodiment 44 or embodiment 45, provided that X₂ is selected from D, E, H, N, and Q.
[0214] 47. The antibody or antigen-binding fragment of any of embodiments 44-46, provided that X₃ is A.
[0215] 48. The antibody or antigen-binding fragment of any of embodiments 44-47, provided that X₄ is selected from D, F, K, R, S, and T.
[0216] 49. The antibody or antigen-binding fragment of any of embodiments 1-42, provided that the LCDR3 comprises an amino acid sequence selected from SEQ ID NOS: 100315-100482.
[0217] 50. The antibody or antigen-binding fragment of embodiment 1, provided that the HFR1 comprises SEQ ID NO: 100100, the HFR2 comprises SEQ ID NO: 100101, the HFR3 comprises SEQ ID NO: 100102, the HFR4 comprises SEQ ID NO: 100103, the LFRI comprises SEQ ID NO: 100104, the LFR2 comprises SEQ ID NO: 100105, the LFR3 comprises SEQ ID NO: 100106, and the LFR4 comprises SEQ ID NO: 100107.
[0218] 51. The antibody or antigen-binding fragment of embodiment 1, provided that the HFR1 comprises SEQ ID NO: 100108, the HFR2 comprises SEQ ID NO: 100101, the HFR3 comprises SEQ ID NO: 100109, the HFR4 comprises SEQ ID NO: 100103, the LFRI comprises SEQ ID NO: 100104, the LFR2 comprises SEQ ID NO: 100105, the LFR3 comprises SEQ ID NO: 100110, and the LFR4 comprises SEQ ID NO: 100107.
[0219] 52. The antibody or antigen-binding fragment of embodiment 1, provided that the HFR1 comprises SEQ ID NO: 100108, the HFR2 comprises SEQ ID NO: 100101, the HFR3 comprises SEQ ID NO: 100109, the HFR4 comprises SEQ ID NO: 100103, the LFRI comprises SEQ ID NO: 100104, the LFR2 comprises SEQ ID NO: 100105, the LFR3 comprises SEQ ID NO: 100106, and the LFR4 comprises SEQ ID NO: 100107.
[0220] 53. The antibody or antigen-binding fragment of any of embodiments 1 and 50-52, provided that the HCDR1 comprises SEQ ID NO: 1009, the HCDR2 comprises SEQ ID NO: 10012, the HCDR3 comprises SEQ ID NO: 10015, the LCDR1 comprises SEQ ID NO: 10018, the LCDR2 comprises SEQ ID NO: 10021, and the LCDR3 comprises SEQ ID NO: 10024.
[0221] 54. The antibody or antigen-binding fragment of any of embodiments 1 and 50-52, provided that the HCDR1 comprises SEQ ID NO: 100150, the HCDR2 comprises SEQ ID NO: 10012, the HCDR3 comprises SEQ ID NO: 100152, the LCDR1 comprises SEQ ID NO: 10018, the LCDR2 comprises SEQ ID NO: 10021, and the LCDR3 comprises SEQ ID NO: 100155.
[0222] 55. The antibody or antigen-binding fragment of embodiment 1, provided that the HFR1 comprises SEQ ID NO: 100100, the HFR2 comprises SEQ ID NO: 100101, the HFR3 comprises SEQ ID NO: 100102, the HFR4 comprises SEQ ID NO: 100103, the LFRI comprises SEQ ID NO: 100104, the LFR2 comprises SEQ ID NO: 100105, the LFR3 comprises SEQ ID NO: 100106, the LFR4 comprises SEQ ID NO: 100107, the HCDR1 comprises SEQ ID NO: 1009, the HCDR2 comprises SEQ ID NO: 10012, the HCDR3 comprises SEQ ID NO: 10015, the LCDR1 comprises SEQ ID NO: 10018, the LCDR2 comprises SEQ ID NO: 10021, and the LCDR3 comprises SEQ ID NO: 10024.
[0223] 56. The antibody or antigen-binding fragment of embodiment 1, provided that the HFR1 comprises SEQ ID NO: 100100, the HFR2 comprises SEQ ID NO: 100101, the HFR3 comprises SEQ ID NO: 100102, the HFR4 comprises SEQ ID NO: 100103, the LFRI comprises SEQ ID NO: 100104, the LFR2 comprises SEQ ID NO: 100105, the LFR3 comprises SEQ ID NO: 100106, the LFR4 comprises SEQ ID NO: 100107, the HCDR1 comprises SEQ ID NO: 100150, the HCDR2 comprises SEQ ID NO: 10012, the HCDR3 comprises SEQ ID NO: 100152, the LCDR1 comprises SEQ ID NO: 10018, the LCDR2 comprises SEQ ID NO: 10021, and the LCDR3 comprises SEQ ID NO: 100155.
[0224] 57. The antibody or antigen-binding fragment of embodiment 1, provided that the HFR1 comprises SEQ ID NO: 100108, the HFR2 comprises SEQ ID NO: 100101, the HFR3 comprises SEQ ID NO: 100109, the HFR4 comprises SEQ ID NO: 100103, the LFRI comprises SEQ ID NO: 100104, the LFR2 comprises SEQ ID NO: 100105, the LFR3 comprises SEQ ID NO: 100110, the LFR4 comprises SEQ ID NO: 100107, the HCDR1 comprises SEQ ID NO: 1009, the HCDR2 comprises SEQ ID NO: 10012, the HCDR3 comprises SEQ ID NO: 10015, the LCDR1 comprises SEQ ID NO: 10018, the LCDR2 comprises SEQ ID NO: 10021, and the LCDR3 comprises SEQ ID NO: 10024.
[0225] 58. The antibody or antigen-binding fragment of embodiment 1, provided that the HFR1 comprises SEQ ID NO: 100108, the HFR2 comprises SEQ ID NO: 100101, the HFR3 comprises SEQ ID NO: 100109, the HFR4 comprises SEQ ID NO: 100103, the LFRI comprises SEQ ID NO: 100104, the LFR2 comprises SEQ ID NO: 100105, the LFR3 comprises SEQ ID NO: 100110, the LFR4 comprises SEQ ID NO: 100107, the HCDR1 comprises SEQ ID NO: 100150, the HCDR2 comprises SEQ ID NO: 10012, the HCDR3 comprises SEQ ID NO: 100152, the LCDR1 comprises SEQ ID NO: 10018, the LCDR2 comprises SEQ ID NO: 10021, and the LCDR3 comprises SEQ ID NO: 100155.
[0226] 59. The antibody or antigen-binding fragment of embodiment 1, provided that the HFR1 comprises SEQ ID NO: 100108, the HFR2 comprises SEQ ID NO: 100101, the HFR3 comprises SEQ ID NO: 100109, the HFR4 comprises SEQ ID NO: 100103, the LFRI comprises SEQ ID NO: 100104, the LFR2 comprises SEQ ID NO: 100105, the LFR3 comprises SEQ ID NO: 100106, the LFR4 comprises SEQ ID NO: 100107, the HCDR1 comprises SEQ ID NO: 1009, the HCDR2 comprises SEQ ID NO: 10012, the HCDR3 comprises SEQ ID NO: 10015, the LCDR1 comprises SEQ ID NO: 10018, the LCDR2 comprises SEQ ID NO: 10021, and the LCDR3 comprises SEQ ID NO: 10024.
[0227] 60. The antibody or antigen-binding fragment of embodiment 1, provided that the HFR1 comprises SEQ ID NO: 100108, the HFR2 comprises SEQ ID NO: 100101, the HFR3 comprises SEQ ID NO: 100109, the HFR4 comprises SEQ ID NO: 100103, the LFRI comprises SEQ ID NO: 100104, the LFR2 comprises SEQ ID NO: 100105, the LFR3 comprises SEQ ID NO: 100106, the LFR4 comprises SEQ ID NO: 100107, the HCDR1 comprises SEQ ID NO: 100150, the HCDR2 comprises SEQ ID NO: 10012, the HCDR3 comprises SEQ ID NO: 100152, the LCDR1 comprises SEQ ID NO: 10018, the LCDR2 comprises SEQ ID NO: 10021, and the LCDR3 comprises SEQ ID NO: 100155.
[0228] 61. The antibody or antigen-binding fragment of any of embodiments 1, 54, 56, 58, and 60, provided that the X₁ of SEQ ID NO: 100150 is D.
[0229] 62. The antibody or antigen-binding fragment of any of embodiments 1, 54, 56, 58, and 60, provided that the X₁ of SEQ ID NO: 100150 is E.
[0230] 63. The antibody or antigen-binding fragment of any of embodiments 1, 54, 56, 58, and 60-62, provided that the X₂ of SEQ ID NO: 100150 is I.
[0231] 64. The antibody or antigen-binding fragment of any of embodiments 1, 54, 56, 58, and 60-62, provided that the X₂ of SEQ ID NO: 100150 is P.
[0232] 65. The antibody or antigen-binding fragment of any of embodiments 1, 54, 56, 58, and 60-62, provided that the X₂ of SEQ ID NO: 100150 is V.
[0233] 66. The antibody or antigen-binding fragment of any of embodiments 1, 54, 56, 58, and 60-65, provided that the X₃ of SEQ ID NO: 100150 is G.
[0234] 67. The antibody or antigen-binding fragment of any of embodiments 1, 54, 56, 58, and 60-65, provided that the X₃ of SEQ ID NO: 100150 is Q.
[0235] 68. The antibody or antigen-binding fragment of any of embodiments 1, 54, 56, 58, and 60-65, provided that the X₃ of SEQ ID NO: 100150 is S.
[0236] 69. The antibody or antigen-binding fragment of any of embodiments 1, 54, 56, 58, and 60-65, provided that the X₃ of SEQ ID NO: 100150 is V.
[0237] 70. The antibody or antigen-binding fragment of any of embodiments 1, 54, 56, 58, and 60-69, provided that the X₄ of SEQ ID NO: 100150 is F.
[0238] 71. The antibody or antigen-binding fragment of any of embodiments 1, 54, 56, 58, and 60-69, provided that the X₄ of SEQ ID NO: 100150 is Y.
[0239] 72. The antibody or antigen-binding fragment of any of embodiments 1, 54, 56, 58, and 60-71, provided that the X₅ of SEQ ID NO: 100150 is I.
[0240] 73. The antibody or antigen-binding fragment of any of embodiments 1, 54, 56, 58, and 60-71, provided that the X₅ of SEQ ID NO: 100150 is M.
[0241] 74. The antibody or antigen-binding fragment of any of embodiments 1, 54, 56, 58, and 60-73, provided that the X₁ of SEQ ID NO: 100152 is L.
[0242] 75. The antibody or antigen-binding fragment of any of embodiments 1, 54, 56, 58, and 60-73, provided that the X₁ of SEQ ID NO: 100152 is M.
[0243] 76. The antibody or antigen-binding fragment of any of embodiments 1, 54, 56, 58, and 60-75, provided that the X₂ of SEQ ID NO: 100152 is E.
[0244] 77. The antibody or antigen-binding fragment of any of embodiments 1, 54, 56, 58, and 60-75, provided that the X₂ of SEQ ID NO: 100152 is I.
[0245] 78. The antibody or antigen-binding fragment of any of embodiments 1, 54, 56, 58, and 60-75, provided that the X₂ of SEQ ID NO: 100152 is K.
[0246] 79. The antibody or antigen-binding fragment of any of embodiments 1, 54, 56, 58, and 60-75, provided that the X₂ of SEQ ID NO: 100152 is L.
[0247] 80. The antibody or antigen-binding fragment of any of embodiments 1, 54, 56, 58, and 60-75, provided that the X₂ of SEQ ID NO: 100152 is M.
[0248] 81. The antibody or antigen-binding fragment of any of embodiments 1, 54, 56, 58, and 60-75, provided that the X₂ of SEQ ID NO: 100152 is Q.
[0249] 82. The antibody or antigen-binding fragment of any of embodiments 1, 54, 56, 58, and 60-75, provided that the X₂ of SEQ ID NO: 100152 is T.
[0250] 83. The antibody or antigen-binding fragment of any of embodiments 1, 54, 56, 58, and 60-75, provided that the X₂ of SEQ ID NO: 100152 is V.
[0251] 84. The antibody or antigen-binding fragment of any of embodiments 1, 54, 56, 58, and 60-75, provided that the X₂ of SEQ ID NO: 100152 is W.
[0252] 85. The antibody or antigen-binding fragment of any of embodiments 1, 54, 56, 58, and 60-75, provided that the X₂ of SEQ ID NO: 100152 is Y.
[0253] 86. The antibody or antigen-binding fragment of any of embodiments 1, 54, 56, 58, and 60-85, provided that the X₁ of SEQ ID NO: 100155 is Q.
[0254] 87. The antibody or antigen-binding fragment of any of embodiments 1, 54, 56, 58, and 60-85, provided that the X₁ of SEQ ID NO: 100155 is N.
[0255] 88. The antibody or antigen-binding fragment of any of embodiments 1, 54, 56, 58, and 60-87, provided that the X₂ of SEQ ID NO: 100155 is D.
[0256] 89. The antibody or antigen-binding fragment of any of embodiments 1, 54, 56, 58, and 60-87, provided that the X₂ of SEQ ID NO: 100155 is E.
[0257] 90. The antibody or antigen-binding fragment of any of embodiments 1, 54, 56, 58, and 60-87, provided that the X₂ of SEQ ID NO: 100155 is H.
[0258] 91. The antibody or antigen-binding fragment of any of embodiments 1, 54, 56, 58, and 60-87, provided that the X₂ of SEQ ID NO: 100155 is N.
[0259] 92. The antibody or antigen-binding fragment of any of embodiments 1, 54, 56, 58, and 60-87, provided that the X₂ of SEQ ID NO: 100155 is Q.
[0260] 93. The antibody or antigen-binding fragment of any of embodiments 1, 54, 56, 58, and 60-87, provided that the X₂ of SEQ ID NO: 100155 is S.
[0261] 94. The antibody or antigen-binding fragment of any of embodiments 1, 54, 56, 58, and 60-93, provided that the X₃ of SEQ ID NO: 100155 is A.
[0262] 95. The antibody or antigen-binding fragment of any of embodiments 1, 54, 56, 58, and 60-93, provided that the X₃ of SEQ ID NO: 100155 is G.
[0263] 96. The antibody or antigen-binding fragment of any of embodiments 1, 54, 56, 58, and 60-95, provided that the X₄ of SEQ ID NO: 100155 is D.
[0264] 97. The antibody or antigen-binding fragment of any of embodiments 1, 54, 56, 58, and 60-95, provided that the X₄ of SEQ ID NO: 100155 is F.
[0265] 98. The antibody or antigen-binding fragment of any of embodiments 1, 54, 56, 58, and 60-95, provided that the X₄ of SEQ ID NO: 100155 is K.
[0266] 99. The antibody or antigen-binding fragment of any of embodiments 1, 54, 56, 58, and 60-95, provided that the X₄ of SEQ ID NO: 100155 is N.
[0267] 100. The antibody or antigen-binding fragment of any of embodiments 1, 54, 56, 58, and 60-95, provided that the X₄ of SEQ ID NO: 100155 is R.
[0268] 101. The antibody or antigen-binding fragment of any of embodiments 1, 54, 56, 58, and 60-95, provided that the X₄ of SEQ ID NO: 100155 is S.
[0269] 102. The antibody or antigen-binding fragment of any of embodiments 1, 54, 56, 58, and 60-95, provided that the X₄ of SEQ ID NO: 100155 is T.
[0270] 103. The antibody or antigen-binding fragment of any of embodiments 1-102, provided that the antibody or antigen-binding fragment specifically binds to human TL1A.
[0271] 104. The antibody or antigen-binding fragment of embodiment 103, provided that the antibody or antigen-binding fragment specifically binds to human TL1A with a K_{d} of 1×10⁻⁹ M or less.
[0272] 105. The antibody or antigen-binding fragment of embodiment 104, provided that the K_{d} is measured using a method selected from a standard ELISA assay and SPR.
[0273] 106. The antibody or antigen-binding fragment of any of embodiments 1-105, provided that the antibody or antigen-binding fragment inhibits binding of DR3 to human TL1A.
[0274] 107. The antibody or antigen-binding fragment of any of embodiments 1-106, provided that the antibody or antigen-binding fragment inhibits binding of DcR3 to human TL1A.
[0275] 108. The antibody or antigen-binding fragment of any of embodiments 1-107, provided that the antibody or antigen-binding fragment is a humanized antibody, a CDR-grafted antibody, a chimeric antibody, a Fab, a ScFv, or a combination thereof.
[0276] 109. The antibody or antigen-binding fragment of any of embodiments 1-108, comprising a human CH1 domain.
[0277] 110. The antibody or antigen-binding fragment of any of embodiments 1-109, comprising a human CH2 domain.
[0278] 111. The antibody or antigen-binding fragment of embodiment 110, provided that that CH2 domain comprises at least one mutation selected from L234A, L235A, and G237A, as numbered using Kabat.
[0279] 112. The antibody or antigen-binding fragment of any of embodiments 1-111, comprising a human CH3 domain.
[0280] 113. A pharmaceutical composition comprising a therapeutically effective amount of the antibody or antigen-binding fragment of any of embodiments 1-112, and a pharmaceutically acceptable carrier.
[0281] 114. A method of treating an inflammatory disease in a subject in need thereof, comprising administering to the subject a therapeutically effective amount of the antibody or antigen-binding fragment of any of embodiments 1-113.
[0282] 115. The method of embodiment 114, provided that the inflammatory disease is inflammatory bowel disease.
[0283] 116. The method of embodiment 115, provided that the inflammatory bowel disease comprises Crohn's disease.
[0284] 117. The method of embodiment 116, provided that the subject has been determined to be non-responsive to anti-TNFalpha therapy.
[0285] 118. The method of embodiment 116 or embodiment 117, provided that the subject has been determined to comprise a disease phenotype comprising non-stricturing/non-penetrating, stricturing, stricturing and penetrating, or isolated internal penetrating.
[0286] 119. An antibody or antigen-binding fragment that specifically binds to TL1A, comprising: a heavy chain variable region comprising four heavy chain framework regions (HFR1, HFR2, HFR3, and HFR4) comprising SEQ ID NOS: 100100-100103, and three heavy chain complementarity-determining regions (HCDR1, HCDR2, and HCDR3) comprising:
   [0287] (a) a HCDR1 selected from: (i) a HCDR1 comprising SEQ ID NO: 1009, (ii) a HCDR1 comprising SEQ ID NO: 100150, wherein X₁ is selected from D and E, X₂ is selected from I, P and V, X₃ is selected from G, Q, S, and V, X₄ is selected from F and Y, and X₅ is selected from I and M, (iii) a HCDR1 selected from SEQ ID NOS: 100200-100295, and (iv) a HCDR1 comprising an amino acid sequence that differs from a sequence selected from the group consisting of SEQ ID NOS: 1009, 100150 and 100200-100295 by up to five, four, three, or two amino acids,
   [0288] (b) a HCDR2 selected from: (i) a HCDR2 comprising SEQ ID NO: 10012, and (ii) a HCDR2 comprising an amino acid sequence that differs from SEQ ID NO: 10012 by up to five, four, three, or two amino acids, and
   [0289] (c) a HCDR3 selected from (i) a HCDR3 comprising SEQ ID NO: 10015, (ii) a HCDR3 comprising SEQ ID NO: 100152, wherein X₁ is selected from L and M, and X₂ is selected from E, I, K, L, M, Q, T, V, W, and Y, (iii) a HCDR3 selected from SEQ ID NOS: 100296-100314, and (iv) a HCDR3 comprising an amino acid sequence that differs from a sequence selected from the group consisting of SEQ ID NOS: 10015, 100152 and 100296-100314 by up to five, four, three, or two amino acids; and
[0290] a light chain variable region comprising four light chain framework regions (LFR1, LFR2, LFR3, and LFR4) comprising SEQ ID NOS: 100104-100107, and three light chain complementarity-determining regions (LCDR1, LCDR2, and LCDR3) comprising:
   [0291] (a) a LCDR1 selected from: (i) a LCDR1 comprising SEQ ID NO: 10018, and (ii) a LCDR1 comprising an amino acid sequence that differs from SEQ ID NO: 10018 by up to five, four, three, or two amino acids,
   [0292] (b) a LCDR2 selected from: (i) a LCDR2 comprising SEQ ID NO: 10021, and (ii) a LCDR2 comprising an amino acid sequence that differs from SEQ ID NO: 10021 by up to five, four, three, or two amino acids, and
   [0293] (c) a LCDR3 selected from (i) a LCDR3 comprising SEQ ID NO: 10024, (ii) a LCDR3 comprising SEQ ID NO: 100155, wherein X₁ is selected from Q and N, X₂ is selected from D, E, H, N, Q, and S, X₃ is selected from A and G, and X₄ is selected from D, F, K, N, R, S, and T, (iii) a LCDR3 selected from SEQ ID NOS: 100315-100482, and (iv) a LCDR3 comprising an amino acid sequence that differs from a sequence selected from the group consisting of SEQ ID NOS: 10024, 100155, and 100315-100482 by up to five, four, three, or two amino acids.
[0294] 120. The antibody or antigen-binding fragment of embodiment 119, provided that the HCDR1 comprises SEQ ID NO: 1009.
[0295] 121. The antibody or antigen-binding fragment of embodiment 119, provided that the HCDR1 comprises SEQ ID NO: 100150.
[0296] 122. The antibody or antigen-binding fragment of embodiment 121, provided that X₁ is E.
[0297] 123. The antibody or antigen-binding fragment of embodiment 121 or embodiment 122, provided that X₂ is selected from P and V.
[0298] 124. The antibody or antigen-binding fragment of any of embodiments 121-123, provided that X₃ is selected from G, S, and V.
[0299] 125. The antibody or antigen-binding fragment of any of embodiments 121-124, provided that X₄ is F.
[0300] 126. The antibody or antigen-binding fragment of any of embodiments 121-125, provided that X₅ is I.
[0301] 127. The antibody or antigen-binding fragment of embodiment 119, provided that the HCDR1 comprises an amino acid sequence selected from SEQ ID NOS: 100200-100295.
[0302] 128. The antibody or antigen-binding fragment of any of embodiments 119-127, provided that the HCDR2 comprises SEQ ID NO: 10012.
[0303] 129. The antibody or antigen-binding fragment of any of embodiments 119-127, provided that the HCDR2 comprises an amino acid sequence that differs from SEQ ID NO: 10012 by up to five, four, three, or two amino acids.
[0304] 130. The antibody or antigen-binding fragment of any of embodiments 119-129, provided that the HCDR3 comprises SEQ ID NO: 10015.
[0305] 131. The antibody or antigen-binding fragment of any of embodiments 119-129, provided that the HCDR3 comprises SEQ ID NO: 100152.
[0306] 132. The antibody or antigen-binding fragment of embodiment 131, provided that X₁ is M.
[0307] 133. The antibody or antigen-binding fragment of embodiment 131 or embodiment 132, provided that X₂ is selected from E, I, K, L, M, Q, T, W, and Y.
[0308] 134. The antibody or antigen-binding fragment of any of embodiments 119-129, provided that the HCDR3 comprises a sequence selected from SEQ ID NOS: 100296-100314.
[0309] 135. The antibody or antigen-binding fragment of any of embodiments 119-134, provided that the LCDR1 comprises SEQ ID NO: 10018.
[0310] 136. The antibody or antigen-binding fragment of any of embodiments 119-134, provided that the LCDR1 comprises an amino acid sequence that differs from SEQ ID NO: 10018 by up to five, four, three, or two amino acids.
[0311] 137. The antibody or antigen-binding fragment of any of embodiments 119-136, provided that the LCDR2 comprises SEQ ID NO: 10021.
[0312] 138. The antibody or antigen-binding fragment of any of embodiments 119-136, provided that the LCDR2 comprises an amino acid sequence that differs from SEQ ID NO: 10021 by up to five, four, three, or two amino acids.
[0313] 139. The antibody or antigen-binding fragment of any of embodiments 119-138, provided that the LCDR3 comprises SEQ ID NO: 10024.
[0314] 140. The antibody or antigen-binding fragment of any of embodiments 119-138, provided that the LCDR3 comprises SEQ ID NO: 100155.
[0315] 141. The antibody or antigen-binding fragment of embodiment 140, provided that X₁ is N.
[0316] 142. The antibody or antigen-binding fragment of embodiment 140 or embodiment 141, provided that X₂ is selected from D, E, H, N, and Q.
[0317] 143. The antibody or antigen-binding fragment of any of embodiments 140-142, provided that X₃ is A.
[0318] 144. The antibody or antigen-binding fragment of any of embodiments 140-143, provided that X₄ is selected from D, F, K, R, S, and T.
[0319] 145. The antibody or antigen-binding fragment of any of embodiments 119-138, provided that the LCDR3 comprises an amino acid sequence selected from SEQ ID NOS: 100315-100482.
[0320] 146. The antibody or antigen-binding fragment of embodiment 119, provided that the HCDR1 comprises SEQ ID NO: 1009, the HCDR2 comprises SEQ ID NO: 10012, the HCDR3 comprises SEQ ID NO: 10015, the LCDR1 comprises SEQ ID NO: 10018, the LCDR2 comprises SEQ ID NO: 10021, and the LCDR3 comprises SEQ ID NO: 10024.
[0321] 147. The antibody or antigen-binding fragment of embodiment 119, provided that the HCDR1 comprises SEQ ID NO: 100150, the HCDR2 comprises SEQ ID NO: 10012, the HCDR3 comprises SEQ ID NO: 100152, the LCDR1 comprises SEQ ID NO: 10018, the LCDR2 comprises SEQ ID NO: 10021, and the LCDR3 comprises SEQ ID NO: 100155.
[0322] 148. The antibody or antigen-binding fragment of embodiment 119 or embodiment 147, provided that the X₁ of SEQ ID NO: 100150 is D.
[0323] 149. The antibody or antigen-binding fragment of embodiment 119 or embodiment 147 provided that the X₁ of SEQ ID NO: 100150 is E.
[0324] 150. The antibody or antigen-binding fragment of any of embodiments 119, 147-149, provided that the X₂ of SEQ ID NO: 100150 is I.
[0325] 151. The antibody or antigen-binding fragment of any of embodiments 119, 147-149, provided that the X₂ of SEQ ID NO: 100150 is P.
[0326] 152. The antibody or antigen-binding fragment of any of embodiments 119, 147-149, provided that the X₂ of SEQ ID NO: 100150 is V.
[0327] 153. The antibody or antigen-binding fragment of any of embodiments 119, 147-152, provided that the X₃ of SEQ ID NO: 100150 is G.
[0328] 154. The antibody or antigen-binding fragment of any of embodiments 119, 147-152, provided that the X₃ of SEQ ID NO: 100150 is Q.
[0329] 155. The antibody or antigen-binding fragment of any of embodiments 119, 147-152, provided that the X₃ of SEQ ID NO: 100150 is S.
[0330] 156. The antibody or antigen-binding fragment of any of embodiments 119, 147-152, provided that the X₃ of SEQ ID NO: 100150 is V.
[0331] 157. The antibody or antigen-binding fragment of any of embodiments 119, 147-156, provided that the X₄ of SEQ ID NO: 100150 is F.
[0332] 158. The antibody or antigen-binding fragment of any of embodiments 119, 147-156, provided that the X₄ of SEQ ID NO: 100150 is Y.
[0333] 159. The antibody or antigen-binding fragment of any of embodiments 119, 147-158, provided that the X₅ of SEQ ID NO: 100150 is I.
[0334] 160. The antibody or antigen-binding fragment of any of embodiments 119, 147-158, provided that the X₅ of SEQ ID NO: 100150 is M.
[0335] 161. The antibody or antigen-binding fragment of any of embodiments 119, 147-160, provided that the X₁ of SEQ ID NO: 100152 is L.
[0336] 162. The antibody or antigen-binding fragment of any of embodiments 119, 147-160, provided that the X₁ of SEQ ID NO: 100152 is M.
[0337] 163. The antibody or antigen-binding fragment of any of embodiments 119, 147-162, provided that the X₂ of SEQ ID NO: 100152 is E.
[0338] 164. The antibody or antigen-binding fragment of any of embodiments 119, 147-162, provided that the X₂ of SEQ ID NO: 100152 is I.
[0339] 165. The antibody or antigen-binding fragment of any of embodiments 119, 147-162, provided that the X₂ of SEQ ID NO: 100152 is K.
[0340] 166. The antibody or antigen-binding fragment of any of embodiments 119, 147-162, provided that the X₂ of SEQ ID NO: 100152 is L.
[0341] 167. The antibody or antigen-binding fragment of any of embodiments 119, 147-162, provided that the X₂ of SEQ ID NO: 100152 is M.
[0342] 168. The antibody or antigen-binding fragment of any of embodiments 119, 147-162, provided that the X₂ of SEQ ID NO: 100152 is Q.
[0343] 169. The antibody or antigen-binding fragment of any of embodiments 119, 147-162, provided that the X₂ of SEQ ID NO: 100152 is T.
[0344] 170. The antibody or antigen-binding fragment of any of embodiments 119, 147-162, provided that the X₂ of SEQ ID NO: 100152 is V.
[0345] 171. The antibody or antigen-binding fragment of any of embodiments 119, 147-162, provided that the X₂ of SEQ ID NO: 100152 is W.
[0346] 172. The antibody or antigen-binding fragment of any of embodiments 119, 147-162, provided that the X₂ of SEQ ID NO: 100152 is Y.
[0347] 173. The antibody or antigen-binding fragment of any of embodiments 119, 147-172, provided that the X₁ of SEQ ID NO: 100155 is Q.
[0348] 174. The antibody or antigen-binding fragment of any of embodiments 119, 147-172, provided that the X₁ of SEQ ID NO: 100155 is N.
[0349] 175. The antibody or antigen-binding fragment of any of embodiments 119, 147-174, provided that the X₂ of SEQ ID NO: 100155 is D.
[0350] 176. The antibody or antigen-binding fragment of any of embodiments 119, 147-174, provided that the X₂ of SEQ ID NO: 100155 is E.
[0351] 177. The antibody or antigen-binding fragment of any of embodiments 119, 147-174, provided that the X₂ of SEQ ID NO: 100155 is H.
[0352] 178. The antibody or antigen-binding fragment of any of embodiments 119, 147-174, provided that the X₂ of SEQ ID NO: 100155 is N.
[0353] 179. The antibody or antigen-binding fragment of any of embodiments 119, 147-174, provided that the X₂ of SEQ ID NO: 100155 is Q.
[0354] 180. The antibody or antigen-binding fragment of any of embodiments 119, 147-174, provided that the X₂ of SEQ ID NO: 100155 is S.
[0355] 181. The antibody or antigen-binding fragment of any of embodiments 119, 147-180, provided that the X₃ of SEQ ID NO: 100155 is A.
[0356] 182. The antibody or antigen-binding fragment of any of embodiments 119, 147-180, provided that the X₃ of SEQ ID NO: 100155 is G.
[0357] 183. The antibody or antigen-binding fragment of any of embodiments 119, 147-182, provided that the X₄ of SEQ ID NO: 100155 is D.
[0358] 184. The antibody or antigen-binding fragment of any of embodiments 119, 147-182, provided that the X₄ of SEQ ID NO: 100155 is F.
[0359] 185. The antibody or antigen-binding fragment of any of embodiments 119, 147-182, provided that the X₄ of SEQ ID NO: 100155 is K.
[0360] 186. The antibody or antigen-binding fragment of any of embodiments 119, 147-182, provided that the X₄ of SEQ ID NO: 100155 is N.
[0361] 187. The antibody or antigen-binding fragment of any of embodiments 119, 147-182, provided that the X₄ of SEQ ID NO: 100155 is R.
[0362] 188. The antibody or antigen-binding fragment of any of embodiments 119, 147-182, provided that the X₄ of SEQ ID NO: 100155 is S.
[0363] 189. The antibody or antigen-binding fragment of any of embodiments 119, 147-182, provided that the X₄ of SEQ ID NO: 100155 is T.
[0364] 190. The antibody or antigen-binding fragment of any of embodiments 119-189, provided that the antibody or antigen-binding fragment specifically binds to human TL1A.
[0365] 191. The antibody or antigen-binding fragment of embodiment 190, provided that the antibody or antigen-binding fragment specifically binds to human TL1A with a K_{d} of 1×10⁻⁹ M or less.
[0366] 192. The antibody or antigen-binding fragment of embodiment 191, provided that the K_{d} is measured using a method selected from a standard ELISA assay and SPR.
[0367] 193. The antibody or antigen-binding fragment of any of embodiments 119-192, provided that the antibody or antigen-binding fragment inhibits binding of DR3 to human TL1A.
[0368] 194. The antibody or antigen-binding fragment of any of embodiments 119-193, provided that the antibody or antigen-binding fragment inhibits binding of DcR3 to human TL1A.
[0369] 195. The antibody or antigen-binding fragment of any of embodiments 119-194, provided that the antibody or antigen-binding fragment is a humanized antibody, a CDR-grafted antibody, a chimeric antibody, a Fab, a ScFv, or a combination thereof.
[0370] 196. The antibody or antigen-binding fragment of any of embodiments 119-195, comprising a human CH1 domain.
[0371] 197. The antibody or antigen-binding fragment of any of embodiments 119-196, comprising a human CH2 domain.
[0372] 198. The antibody or antigen-binding fragment of embodiment 197, provided that that CH2 domain comprises at least one mutation selected from L234A, L235A, and G237A, as numbered using Kabat.
[0373] 199. The antibody or antigen-binding fragment of any of embodiments 119-198, comprising a human CH3 domain.
[0374] 200. A pharmaceutical composition comprising a therapeutically effective amount of the antibody or antigen-binding fragment of any of embodiments 119-199, and a pharmaceutically acceptable carrier.
[0375] 201. A method of treating an inflammatory disease in a subject in need thereof, comprising administering to the subject a therapeutically effective amount of the antibody or antigen-binding fragment of any of embodiments 119-199.
[0376] 202. The method of embodiment 201, provided that the inflammatory disease is inflammatory bowel disease.
[0377] 203. The method of embodiment 202, provided that the inflammatory bowel disease comprises Crohn's disease.
[0378] 204. The method of embodiment 203, provided that the subject has been determined to be non-responsive to anti-TNFalpha therapy.
[0379] 205. The method of embodiment 203 or embodiment 204, provided that the subject has been determined to comprise a disease phenotype comprising non-stricturing/non-penetrating, stricturing, stricturing and penetrating, or isolated internal penetrating.
[0380] 206. An antibody or antigen-binding fragment that specifically binds to TL1A, comprising:
[0381] a heavy chain variable region comprising four heavy chain framework regions (HFR1, HFR2, HFR3, and HFR4) comprising SEQ ID NOS: 100108, 100101, 100109, and 100103, respectively, and three heavy chain complementarity-determining regions (HCDR1, HCDR2, and HCDR3) comprising:
   [0382] (a) a HCDR1 selected from: (i) a HCDR1 comprising SEQ ID NO: 1009, (ii) a HCDR1 comprising SEQ ID NO: 100150, wherein X₁ is selected from D and E, X₂ is selected from I, P and V, X₃ is selected from G, Q, S, and V, X₄ is selected from F and Y, and X₅ is selected from I and M, (iii) a HCDR1 selected from SEQ ID NOS: 100200-100295, and (iv) a HCDR1 comprising an amino acid sequence that differs from a sequence selected from the group consisting of SEQ ID NOS: 1009, 100150 and 100200-100295 by up to five, four, three, or two amino acids,
   [0383] (b) a HCDR2 selected from: (i) a HCDR2 comprising SEQ ID NO: 10012, and (ii) a HCDR2 comprising an amino acid sequence that differs from SEQ ID NO: 10012 by up to five, four, three, or two amino acids, and
   [0384] (c) a HCDR3 selected from (i) a HCDR3 comprising SEQ ID NO: 10015, (ii) a HCDR3 comprising SEQ ID NO: 100152, wherein X₁ is selected from L and M, and X₂ is selected from E, I, K, L, M, Q, T, V, W, and Y, (iii) a HCDR3 selected from SEQ ID NOS: 100296-100314, and (iv) a HCDR3 comprising an amino acid sequence that differs from a sequence selected from the group consisting of SEQ ID NOS: 10015, 100152 and 100296-100314 by up to five, four, three, or two amino acids; and
[0385] a light chain variable region comprising four light chain framework regions (LFR1, LFR2, LFR3, and LFR4) comprising SEQ ID NOS: 100104, 100105, 100110, and 100107, respectively, and three light chain complementarity-determining regions (LCDR1, LCDR2, and LCDR3) comprising:
   [0386] (a) a LCDR1 selected from: (i) a LCDR1 comprising SEQ ID NO: 10018, and (ii) a LCDR1 comprising an amino acid sequence that differs from SEQ ID NO: 10018 by up to five, four, three, or two amino acids,
   [0387] (b) a LCDR2 selected from: (i) a LCDR2 comprising SEQ ID NO: 10021, and (ii) a LCDR2 comprising an amino acid sequence that differs from SEQ ID NO: 10021 by up to five, four, three, or two amino acids, and
   [0388] (c) a LCDR3 selected from (i) a LCDR3 comprising SEQ ID NO: 10024, (ii) a LCDR3 comprising SEQ ID NO: 100155, wherein X₁ is selected from Q and N, X₂ is selected from D, E, H, N, Q, and S, X₃ is selected from A and G, and X₄ is selected from D, F, K, N, R, S, and T, (iii) a LCDR3 selected from SEQ ID NOS: 100315-100482, and (iv) a LCDR3 comprising an amino acid sequence that differs from a sequence selected from the group consisting of SEQ ID NOS: 10024, 100155, and 100315-100482 by up to five, four, three, or two amino acids.
[0389] 207. The antibody or antigen-binding fragment of embodiment 206, provided that the HCDR1 comprises SEQ ID NO: 1009.
[0390] 208. The antibody or antigen-binding fragment of embodiment 206, provided that the HCDR1 comprises SEQ ID NO: 100150.
[0391] 209. The antibody or antigen-binding fragment of embodiment 208, provided that X₁ is E.
[0392] 210. The antibody or antigen-binding fragment of embodiment 208 or embodiment 209, provided that X₂ is selected from P and V.
[0393] 211. The antibody or antigen-binding fragment of any of embodiments 208-210, provided that X₃ is selected from G, S, and V.
[0394] 212. The antibody or antigen-binding fragment of any of embodiments 208-211, provided that X₄ is F.
[0395] 213. The antibody or antigen-binding fragment of any of embodiments 208-212, provided that X₅ is I.
[0396] 214. The antibody or antigen-binding fragment of embodiment 206, provided that the HCDR1 comprises an amino acid sequence selected from SEQ ID NOS: 100200-100295.
[0397] 215. The antibody or antigen-binding fragment of any of embodiments 206-214, provided that the HCDR2 comprises SEQ ID NO: 10012.
[0398] 216. The antibody or antigen-binding fragment of any of embodiments 206-214, provided that the HCDR2 comprises an amino acid sequence that differs from SEQ ID NO: 10012 by up to five, four, three, or two amino acids.
[0399] 217. The antibody or antigen-binding fragment of any of embodiments 206-216, provided that the HCDR3 comprises SEQ ID NO: 10015.
[0400] 218. The antibody or antigen-binding fragment of any of embodiments 206-216, provided that the HCDR3 comprises SEQ ID NO: 100152.
[0401] 219. The antibody or antigen-binding fragment of embodiment 218, provided that X₁ is M.
[0402] 220. The antibody or antigen-binding fragment of embodiment 218 or embodiment 219, provided that X₂ is selected from E, I, K, L, M, Q, T, W, and Y.
[0403] 221. The antibody or antigen-binding fragment of any of embodiments 206-220, provided that the HCDR3 comprises a sequence selected from SEQ ID NOS: 100296-100314.
[0404] 222. The antibody or antigen-binding fragment of any of embodiments 206-221, provided that the LCDR1 comprises SEQ ID NO: 10018.
[0405] 223. The antibody or antigen-binding fragment of any of embodiments 206-221, provided that the LCDR1 comprises an amino acid sequence that differs from SEQ ID NO: 10018 by up to five, four, three, or two amino acids.
[0406] 224. The antibody or antigen-binding fragment of any of embodiments 206-223, provided that the LCDR2 comprises SEQ ID NO: 10021.
[0407] 225. The antibody or antigen-binding fragment of any of embodiments 206-223, provided that the LCDR2 comprises an amino acid sequence that differs from SEQ ID NO: 10021 by up to five, four, three, or two amino acids.
[0408] 226. The antibody or antigen-binding fragment of any of embodiments 206-225, provided that the LCDR3 comprises SEQ ID NO: 10024.
[0409] 227. The antibody or antigen-binding fragment of any of embodiments 206-225, provided that the LCDR3 comprises SEQ ID NO: 100155.
[0410] 228. The antibody or antigen-binding fragment of embodiment 227, provided that X₁ is N.
[0411] 229. The antibody or antigen-binding fragment of embodiment 227 or embodiment 228, provided that X₂ is selected from D, E, H, N, and Q.
[0412] 230. The antibody or antigen-binding fragment of any of embodiments 227-229, provided that X₃ is A.
[0413] 231. The antibody or antigen-binding fragment of any of embodiments 227-230, provided that X₄ is selected from D, F, K, R, S, and T.
[0414] 232. The antibody or antigen-binding fragment of any of embodiments 227-231, provided that the LCDR3 comprises an amino acid sequence selected from SEQ ID NOS: 100315-100482.
[0415] 233. The antibody or antigen-binding fragment of embodiment 206, provided that the HCDR1 comprises SEQ ID NO: 1009, the HCDR2 comprises SEQ ID NO: 10012, the HCDR3 comprises SEQ ID NO: 10015, the LCDR1 comprises SEQ ID NO: 10018, the LCDR2 comprises SEQ ID NO: 10021, and the LCDR3 comprises SEQ ID NO: 10024.
[0416] 234. The antibody or antigen-binding fragment of embodiment 206, provided that the HCDR1 comprises SEQ ID NO: 100150, the HCDR2 comprises SEQ ID NO: 10012, the HCDR3 comprises SEQ ID NO: 100152, the LCDR1 comprises SEQ ID NO: 10018, the LCDR2 comprises SEQ ID NO: 10021, and the LCDR3 comprises SEQ ID NO: 100155.
[0417] 235. The antibody or antigen-binding fragment of embodiment 206 or embodiment 234, provided that the X₁ of SEQ ID NO: 100150 is D.
[0418] 236. The antibody or antigen-binding fragment of embodiment 206 or embodiment 234 provided that the X₁ of SEQ ID NO: 100150 is E.
[0419] 237. The antibody or antigen-binding fragment of any of embodiments 206, 234-236, provided that the X₂ of SEQ ID NO: 100150 is I.
[0420] 238. The antibody or antigen-binding fragment of any of embodiments 206, 234-236, provided that the X₂ of SEQ ID NO: 100150 is P.
[0421] 239. The antibody or antigen-binding fragment of any of embodiments 206, 234-236, provided that the X₂ of SEQ ID NO: 100150 is V.
[0422] 240. The antibody or antigen-binding fragment of any of embodiments 206, 234-239, provided that the X₃ of SEQ ID NO: 100150 is G.
[0423] 241. The antibody or antigen-binding fragment of any of embodiments 206, 234-239, provided that the X₃ of SEQ ID NO: 100150 is Q.
[0424] 242. The antibody or antigen-binding fragment of any of embodiments 206, 234-239, provided that the X₃ of SEQ ID NO: 100150 is S.
[0425] 243. The antibody or antigen-binding fragment of any of embodiments 206, 234-239, provided that the X₃ of SEQ ID NO: 100150 is V.
[0426] 244. The antibody or antigen-binding fragment of any of embodiments 206, 234-243, provided that the X₄ of SEQ ID NO: 100150 is F.
[0427] 245. The antibody or antigen-binding fragment of any of embodiments 206, 234-243, provided that the X₄ of SEQ ID NO: 100150 is Y.
[0428] 246. The antibody or antigen-binding fragment of any of embodiments 206, 234-245, provided that the X₅ of SEQ ID NO: 100150 is I.
[0429] 247. The antibody or antigen-binding fragment of any of embodiments 206, 234-245, provided that the X₅ of SEQ ID NO: 100150 is M.
[0430] 248. The antibody or antigen-binding fragment of any of embodiments 206, 234-247, provided that the X₁ of SEQ ID NO: 100152 is L.
[0431] 249. The antibody or antigen-binding fragment of any of embodiments 206, 234-247, provided that the X₁ of SEQ ID NO: 100152 is M.
[0432] 250. The antibody or antigen-binding fragment of any of embodiments 206, 234-249, provided that the X₂ of SEQ ID NO: 100152 is E.
[0433] 251. The antibody or antigen-binding fragment of any of embodiments 206, 234-249, provided that the X₂ of SEQ ID NO: 100152 is I.
[0434] 252. The antibody or antigen-binding fragment of any of embodiments 206, 234-249, provided that the X₂ of SEQ ID NO: 100152 is K.
[0435] 253. The antibody or antigen-binding fragment of any of embodiments 206, 234-249, provided that the X₂ of SEQ ID NO: 100152 is L.
[0436] 254. The antibody or antigen-binding fragment of any of embodiments 206, 234-249, provided that the X₂ of SEQ ID NO: 100152 is M.
[0437] 255. The antibody or antigen-binding fragment of any of embodiments 206, 234-249, provided that the X₂ of SEQ ID NO: 100152 is Q.
[0438] 256. The antibody or antigen-binding fragment of any of embodiments 206, 234-249, provided that the X₂ of SEQ ID NO: 100152 is T.
[0439] 257. The antibody or antigen-binding fragment of any of embodiments 206, 234-249, provided that the X₂ of SEQ ID NO: 100152 is V.
[0440] 258. The antibody or antigen-binding fragment of any of embodiments 206, 234-249, provided that the X₂ of SEQ ID NO: 100152 is W.
[0441] 259. The antibody or antigen-binding fragment of any of embodiments 206, 234-249, provided that the X₂ of SEQ ID NO: 100152 is Y.
[0442] 260. The antibody or antigen-binding fragment of any of embodiments 206, 234-259, provided that the X₁ of SEQ ID NO: 100155 is Q.
[0443] 261. The antibody or antigen-binding fragment of any of embodiments 206, 234-259, provided that the X₁ of SEQ ID NO: 100155 is N.
[0444] 262. The antibody or antigen-binding fragment of any of embodiments 206, 234-261, provided that the X₂ of SEQ ID NO: 100155 is D.
[0445] 263. The antibody or antigen-binding fragment of any of embodiments 206, 234-261, provided that the X₂ of SEQ ID NO: 100155 is E.
[0446] 264. The antibody or antigen-binding fragment of any of embodiments 206, 234-261, provided that the X₂ of SEQ ID NO: 100155 is H.
[0447] 265. The antibody or antigen-binding fragment of any of embodiments 206, 234-261, provided that the X₂ of SEQ ID NO: 100155 is N.
[0448] 266. The antibody or antigen-binding fragment of any of embodiments 206, 234-261, provided that the X₂ of SEQ ID NO: 100155 is Q.
[0449] 267. The antibody or antigen-binding fragment of any of embodiments 206, 234-261, provided that the X₂ of SEQ ID NO: 100155 is S.
[0450] 268. The antibody or antigen-binding fragment of any of embodiments 206, 234-267, provided that the X₃ of SEQ ID NO: 100155 is A.
[0451] 269. The antibody or antigen-binding fragment of any of embodiments 206, 234-267, provided that the X₃ of SEQ ID NO: 100155 is G.
[0452] 270. The antibody or antigen-binding fragment of any of embodiments 206, 234-269, provided that the X₄ of SEQ ID NO: 100155 is D.
[0453] 271. The antibody or antigen-binding fragment of any of embodiments 206, 234-269, provided that the X₄ of SEQ ID NO: 100155 is F.
[0454] 272. The antibody or antigen-binding fragment of any of embodiments 206, 234-269, provided that the X₄ of SEQ ID NO: 100155 is K.
[0455] 273. The antibody or antigen-binding fragment of any of embodiments 206, 234-269, provided that the X₄ of SEQ ID NO: 100155 is N.
[0456] 274. The antibody or antigen-binding fragment of any of embodiments 206, 234-269, provided that the X₄ of SEQ ID NO: 100155 is R.
[0457] 275. The antibody or antigen-binding fragment of any of embodiments 206, 234-269, provided that the X₄ of SEQ ID NO: 100155 is S.
[0458] 276. The antibody or antigen-binding fragment of any of embodiments 206, 234-269, provided that the X₄ of SEQ ID NO: 100155 is T.
[0459] 277. The antibody or antigen-binding fragment of any of embodiments 206-276, provided that the antibody or antigen-binding fragment specifically binds to human TL1A.
[0460] 278. The antibody or antigen-binding fragment of embodiment 277, provided that the antibody or antigen-binding fragment specifically binds to human TL1A with a K_{d} of 1×10⁻⁹ M or less.
[0461] 279. The antibody or antigen-binding fragment of embodiment 278, provided that the K_{d} is measured using a method selected from a standard ELISA assay and SPR.
[0462] 280. The antibody or antigen-binding fragment of any of embodiments 206-279, provided that the antibody or antigen-binding fragment inhibits binding of DR3 to human TL1A.
[0463] 281. The antibody or antigen-binding fragment of any of embodiments 206-280, provided that the antibody or antigen-binding fragment inhibits binding of DcR3 to human TL1A.
[0464] 282. The antibody or antigen-binding fragment of any of embodiments 206-281, provided that the antibody or antigen-binding fragment is a humanized antibody, a CDR-grafted antibody, a chimeric antibody, a Fab, a ScFv, or a combination thereof.
[0465] 283. The antibody or antigen-binding fragment of any of embodiments 206-282, comprising a human CH1 domain.
[0466] 284. The antibody or antigen-binding fragment of any of embodiments 206-283, comprising a human CH2 domain.
[0467] 285. The antibody or antigen-binding fragment of embodiment 284, provided that that CH2 domain comprises at least one mutation selected from L234A, L235A, and G237A, as numbered using Kabat.
[0468] 286. The antibody or antigen-binding fragment of any of embodiments 206-285, comprising a human CH3 domain.
[0469] 287. A pharmaceutical composition comprising a therapeutically effective amount of the antibody or antigen-binding fragment of any of embodiments 206-286, and a pharmaceutically acceptable carrier.
[0470] 288. A method of treating an inflammatory disease in a subject in need thereof, comprising administering to the subject a therapeutically effective amount of the antibody or antigen-binding fragment of any of embodiments 206-287.
[0471] 289. The method of embodiment 288, provided that the inflammatory disease is inflammatory bowel disease.
[0472] 290. The method of embodiment 289, provided that the inflammatory bowel disease comprises Crohn's disease.
[0473] 291. The method of embodiment 290, provided that the subject has been determined to be non-responsive to anti-TNFalpha therapy.
[0474] 292. The method of embodiment 290 or embodiment 291, provided that the subject has been determined to comprise a disease phenotype comprising non-stricturing/non-penetrating, stricturing, stricturing and penetrating, or isolated internal penetrating.
[0475] 293. An antibody or antigen-binding fragment that specifically binds to TL1A, comprising:
[0476] a heavy chain variable region comprising four heavy chain framework regions (HFR1, HFR2, HFR3, and HFR4) comprising SEQ ID NOS: 100108, 100101, 100109, and 100103, respectively, and three heavy chain complementarity-determining regions (HCDR1, HCDR2, and HCDR3) comprising:
   [0477] (a) a HCDR1 selected from: (i) a HCDR1 comprising SEQ ID NO: 1009, (ii) a HCDR1 comprising SEQ ID NO: 100150, wherein X₁ is selected from D and E, X₂ is selected from I, P and V, X₃ is selected from G, Q, S, and V, X₄ is selected from F and Y, and X₅ is selected from I and M, (iii) a HCDR1 selected from SEQ ID NOS: 100200-100295, and (iv) a HCDR1 comprising an amino acid sequence that differs from a sequence selected from the group consisting of SEQ ID NOS: 1009, 100150 and 100200-100295 by up to five, four, three, or two amino acids,
   [0478] (b) a HCDR2 selected from: (i) a HCDR2 comprising SEQ ID NO: 10012, and (ii) a HCDR2 comprising an amino acid sequence that differs from SEQ ID NO: 10012 by up to five, four, three, or two amino acids, and
   [0479] (c) a HCDR3 selected from (i) a HCDR3 comprising SEQ ID NO: 10015, (ii) a HCDR3 comprising SEQ ID NO: 100152, wherein X₁ is selected from L and M, and X₂ is selected from E, I, K, L, M, Q, T, V, W, and Y, (iii) a HCDR3 selected from SEQ ID NOS: 100296-100314, and (iv) a HCDR3 comprising an amino acid sequence that differs from a sequence selected from the group consisting of SEQ ID NOS: 10015, 100152 and 100296-100314 by up to five, four, three, or two amino acids; and
[0480] a light chain variable region comprising four light chain framework regions (LFR1, LFR2, LFR3, and LFR4) comprising SEQ ID NOS: 100104-100107, and three light chain complementarity-determining regions (LCDR1, LCDR2, and LCDR3) comprising:
   [0481] (a) a LCDR1 selected from: (i) a LCDR1 comprising SEQ ID NO: 10018, and (ii) a LCDR1 comprising an amino acid sequence that differs from SEQ ID NO: 10018 by up to five, four, three, or two amino acids,
   [0482] (b) a LCDR2 selected from: (i) a LCDR2 comprising SEQ ID NO: 10021, and (ii) a LCDR2 comprising an amino acid sequence that differs from SEQ ID NO: 10021 by up to five, four, three, or two amino acids, and
   [0483] (c) a LCDR3 selected from (i) a LCDR3 comprising SEQ ID NO: 10024, (ii) a LCDR3 comprising SEQ ID NO: 100155, wherein X₁ is selected from Q and N, X₂ is selected from D, E, H, N, Q, and S, X₃ is selected from A and G, and X₄ is selected from D, F, K, N, R, S, and T, (iii) a LCDR3 selected from SEQ ID NOS: 100315-100482, and (iv) a LCDR3 comprising an amino acid sequence that differs from a sequence selected from the group consisting of SEQ ID NOS: 10024, 100155, and 100315-100482 by up to five, four, three, or two amino acids.
[0484] 294. The antibody or antigen-binding fragment of embodiment 293, provided that the HCDR1 comprises SEQ ID NO: 1009.
[0485] 295. The antibody or antigen-binding fragment of embodiment 293, provided that the HCDR1 comprises SEQ ID NO: 100150.
[0486] 296. The antibody or antigen-binding fragment of embodiment 295, provided that X₁ is E.
[0487] 297. The antibody or antigen-binding fragment of embodiment 295 or embodiment 296, provided that X₂ is selected from P and V.
[0488] 298. The antibody or antigen-binding fragment of any of embodiments 295-297, provided that X₃ is selected from G, S, and V.
[0489] 299. The antibody or antigen-binding fragment of any of embodiments 295-298, provided that X₄ is F.
[0490] 300. The antibody or antigen-binding fragment of any of embodiments 295-299, provided that X₅ is I.
[0491] 301. The antibody or antigen-binding fragment of embodiment 293, provided that the HCDR1 comprises an amino acid sequence selected from SEQ ID NOS: 100200-100295.
[0492] 302. The antibody or antigen-binding fragment of any of embodiments 293-301, provided that the HCDR2 comprises SEQ ID NO: 10012.
[0493] 303. The antibody or antigen-binding fragment of any of embodiments 293-301 provided that the HCDR2 comprises an amino acid sequence that differs from SEQ ID NO: 10012 by up to five, four, three, or two amino acids.
[0494] 304. The antibody or antigen-binding fragment of any of embodiments 293-303, provided that the HCDR3 comprises SEQ ID NO: 10015.
[0495] 305. The antibody or antigen-binding fragment of any of embodiments 293-303, provided that the HCDR3 comprises SEQ ID NO: 100152.
[0496] 306. The antibody or antigen-binding fragment of embodiment 305, provided that X₁ is M.
[0497] 307. The antibody or antigen-binding fragment of embodiment 305 or embodiment 306, provided that X₂ is selected from E, I, K, L, M, Q, T, W, and Y.
[0498] 308. The antibody or antigen-binding fragment of any of embodiments 293-303, provided that the HCDR3 comprises a sequence selected from SEQ ID NOS: 100296-100314.
[0499] 309. The antibody or antigen-binding fragment of any of embodiments 293-308, provided that the LCDR1 comprises SEQ ID NO: 10018.
[0500] 310. The antibody or antigen-binding fragment of any of embodiments 293-308, provided that the LCDR1 comprises an amino acid sequence that differs from SEQ ID NO: 10018 by up to five, four, three, or two amino acids.
[0501] 311. The antibody or antigen-binding fragment of any of embodiments 293-310, provided that the LCDR2 comprises SEQ ID NO: 10021.
[0502] 312. The antibody or antigen-binding fragment of any of embodiments 293-310, provided that the LCDR2 comprises an amino acid sequence that differs from SEQ ID NO: 10021 by up to five, four, three, or two amino acids.
[0503] 313. The antibody or antigen-binding fragment of any of embodiments 293-312, provided that the LCDR3 comprises SEQ ID NO: 10024.
[0504] 314. The antibody or antigen-binding fragment of any of embodiments 293-312, provided that the LCDR3 comprises SEQ ID NO: 100155.
[0505] 315. The antibody or antigen-binding fragment of embodiment 314, provided that X₁ is N.
[0506] 316. The antibody or antigen-binding fragment of embodiment 314 or embodiment 315, provided that X₂ is selected from D, E, H, N, and Q.
[0507] 317. The antibody or antigen-binding fragment of any of embodiments 314-316, provided that X₃ is A.
[0508] 318. The antibody or antigen-binding fragment of any of embodiments 314-317, provided that X₄ is selected from D, F, K, R, S, and T.
[0509] 319. The antibody or antigen-binding fragment of any of embodiments 314-312, provided that the LCDR3 comprises an amino acid sequence selected from SEQ ID NOS: 100315-100482.
[0510] 320. The antibody or antigen-binding fragment of embodiment 293, provided that the HCDR1 comprises SEQ ID NO: 1009, the HCDR2 comprises SEQ ID NO: 10012, the HCDR3 comprises SEQ ID NO: 10015, the LCDR1 comprises SEQ ID NO: 10018, the LCDR2 comprises SEQ ID NO: 10021, and the LCDR3 comprises SEQ ID NO: 10024.
[0511] 321. The antibody or antigen-binding fragment of embodiment 293, provided that the HCDR1 comprises SEQ ID NO: 100150, the HCDR2 comprises SEQ ID NO: 10012, the HCDR3 comprises SEQ ID NO: 100152, the LCDR1 comprises SEQ ID NO: 10018, the LCDR2 comprises SEQ ID NO: 10021, and the LCDR3 comprises SEQ ID NO: 100155.
[0512] 322. The antibody or antigen-binding fragment of embodiment 293 or embodiment 321, provided that the X₁ of SEQ ID NO: 100150 is D.
[0513] 323. The antibody or antigen-binding fragment of embodiment 293 or embodiment 321 provided that the X₁ of SEQ ID NO: 100150 is E.
[0514] 324. The antibody or antigen-binding fragment of any of embodiments 293, 321-323, provided that the X₂ of SEQ ID NO: 100150 is I.
[0515] 325. The antibody or antigen-binding fragment of any of embodiments 293, 321-323, provided that the X₂ of SEQ ID NO: 100150 is P.
[0516] 326. The antibody or antigen-binding fragment of any of embodiments 293, 321-323, provided that the X₂ of SEQ ID NO: 100150 is V.
[0517] 327. The antibody or antigen-binding fragment of any of embodiments 293, 321-326, provided that the X₃ of SEQ ID NO: 100150 is G.
[0518] 328. The antibody or antigen-binding fragment of any of embodiments 293, 321-326, provided that the X₃ of SEQ ID NO: 100150 is Q.
[0519] 329. The antibody or antigen-binding fragment of any of embodiments 293, 321-326, provided that the X₃ of SEQ ID NO: 100150 is S.
[0520] 330. The antibody or antigen-binding fragment of any of embodiments 293, 321-326, provided that the X₃ of SEQ ID NO: 100150 is V.
[0521] 331. The antibody or antigen-binding fragment of any of embodiments 293, 321-330, provided that the X₄ of SEQ ID NO: 100150 is F.
[0522] 332. The antibody or antigen-binding fragment of any of embodiments 293, 321-330, provided that the X₄ of SEQ ID NO: 100150 is Y.
[0523] 333. The antibody or antigen-binding fragment of any of embodiments 293, 321-332, provided that the X₅ of SEQ ID NO: 100150 is I.
[0524] 334. The antibody or antigen-binding fragment of any of embodiments 293, 321-332, provided that the X₅ of SEQ ID NO: 100150 is M.
[0525] 335. The antibody or antigen-binding fragment of any of embodiments 293, 321-334, provided that the X₁ of SEQ ID NO: 100152 is L.
[0526] 336. The antibody or antigen-binding fragment of any of embodiments 293, 321-334, provided that the X₁ of SEQ ID NO: 100152 is M.
[0527] 337. The antibody or antigen-binding fragment of any of embodiments 293, 321-336, provided that the X₂ of SEQ ID NO: 100152 is E.
[0528] 338. The antibody or antigen-binding fragment of any of embodiments 293, 321-336, provided that the X₂ of SEQ ID NO: 100152 is I.
[0529] 339. The antibody or antigen-binding fragment of any of embodiments 293, 321-336, provided that the X₂ of SEQ ID NO: 100152 is K.
[0530] 340. The antibody or antigen-binding fragment of any of embodiments 293, 321-336, provided that the X₂ of SEQ ID NO: 100152 is L.
[0531] 341. The antibody or antigen-binding fragment of any of embodiments 293, 321-336, provided that the X₂ of SEQ ID NO: 100152 is M.
[0532] 342. The antibody or antigen-binding fragment of any of embodiments 293, 321-336, provided that the X₂ of SEQ ID NO: 100152 is Q.
[0533] 343. The antibody or antigen-binding fragment of any of embodiments 293, 321-336, provided that the X₂ of SEQ ID NO: 100152 is T.
[0534] 344. The antibody or antigen-binding fragment of any of embodiments 293, 321-336, provided that the X₂ of SEQ ID NO: 100152 is V.
[0535] 345. The antibody or antigen-binding fragment of any of embodiments 293, 321-336, provided that the X₂ of SEQ ID NO: 100152 is W.
[0536] 346. The antibody or antigen-binding fragment of any of embodiments 293, 321-336, provided that the X₂ of SEQ ID NO: 100152 is Y.
[0537] 347. The antibody or antigen-binding fragment of any of embodiments 293, 321-346, provided that the X₁ of SEQ ID NO: 100155 is Q.
[0538] 348. The antibody or antigen-binding fragment of any of embodiments 293, 321-346, provided that the X₁ of SEQ ID NO: 100155 is N.
[0539] 349. The antibody or antigen-binding fragment of any of embodiments 293, 321-348, provided that the X₂ of SEQ ID NO: 100155 is D.
[0540] 350. The antibody or antigen-binding fragment of any of embodiments 293, 321-348, provided that the X₂ of SEQ ID NO: 100155 is E.
[0541] 351. The antibody or antigen-binding fragment of any of embodiments 293, 321-348, provided that the X₂ of SEQ ID NO: 100155 is H.
[0542] 352. The antibody or antigen-binding fragment of any of embodiments 293, 321-348, provided that the X₂ of SEQ ID NO: 100155 is N.
[0543] 353. The antibody or antigen-binding fragment of any of embodiments 293, 321-348, provided that the X₂ of SEQ ID NO: 100155 is Q.
[0544] 354. The antibody or antigen-binding fragment of any of embodiments 293, 321-348, provided that the X₂ of SEQ ID NO: 100155 is S.
[0545] 355. The antibody or antigen-binding fragment of any of embodiments 293, 321-354, provided that the X₃ of SEQ ID NO: 100155 is A.
[0546] 356. The antibody or antigen-binding fragment of any of embodiments 293, 321-354, provided that the X₃ of SEQ ID NO: 100155 is G.
[0547] 357. The antibody or antigen-binding fragment of any of embodiments 293, 321-356, provided that the X₄ of SEQ ID NO: 100155 is D.
[0548] 358. The antibody or antigen-binding fragment of any of embodiments 293, 321-356, provided that the X₄ of SEQ ID NO: 100155 is F.
[0549] 359. The antibody or antigen-binding fragment of any of embodiments 293, 321-356, provided that the X₄ of SEQ ID NO: 100155 is K.
[0550] 360. The antibody or antigen-binding fragment of any of embodiments 293, 321-356, provided that the X₄ of SEQ ID NO: 100155 is N.
[0551] 361. The antibody or antigen-binding fragment of any of embodiments 293, 321-356, provided that the X₄ of SEQ ID NO: 100155 is R.
[0552] 362. The antibody or antigen-binding fragment of any of embodiments 293, 321-356, provided that the X₄ of SEQ ID NO: 100155 is S.
[0553] 363. The antibody or antigen-binding fragment of any of embodiments 293, 321-356, provided that the X₄ of SEQ ID NO: 100155 is T.
[0554] 364. The antibody or antigen-binding fragment of any of embodiments 293-363, provided that the antibody or antigen-binding fragment specifically binds to human TL1A.
[0555] 365. The antibody or antigen-binding fragment of embodiment 364, provided that the antibody or antigen-binding fragment specifically binds to human TL1A with a K_{d} of 1×10⁻⁹ M or less.
[0556] 366. The antibody or antigen-binding fragment of embodiment 365, provided that the K_{d} is measured using a method selected from a standard ELISA assay and SPR.
[0557] 367. The antibody or antigen-binding fragment of any of embodiments 293-366, provided that the antibody or antigen-binding fragment inhibits binding of DR3 to human TL1A.
[0558] 368. The antibody or antigen-binding fragment of any of embodiments 293-367, provided that the antibody or antigen-binding fragment inhibits binding of DcR3 to human TL1A.
[0559] 369. The antibody or antigen-binding fragment of any of embodiments 293-368, provided that the antibody or antigen-binding fragment is a humanized antibody, a CDR-grafted antibody, a chimeric antibody, a Fab, a ScFv, or a combination thereof.
[0560] 370. The antibody or antigen-binding fragment of any of embodiments 293-369, comprising a human CH1 domain.
[0561] 371. The antibody or antigen-binding fragment of any of embodiments 293-370, comprising a human CH2 domain.
[0562] 372. The antibody or antigen-binding fragment of embodiment 371, provided that that CH2 domain comprises at least one mutation selected from L234A, L235A, and G237A, as numbered using Kabat.
[0563] 373. The antibody or antigen-binding fragment of any of embodiments 293-372, comprising a human CH3 domain.
[0564] 374. A pharmaceutical composition comprising a therapeutically effective amount of the antibody or antigen-binding fragment of any of embodiments 293-373, and a pharmaceutically acceptable carrier.
[0565] 375. A method of treating an inflammatory disease in a subject in need thereof, comprising administering to the subject a therapeutically effective amount of the antibody or antigen-binding fragment of any of embodiments 293-373.
[0566] 376. The method of embodiment 375, provided that the inflammatory disease is inflammatory bowel disease.
[0567] 377. The method of embodiment 376, provided that the inflammatory bowel disease comprises Crohn's disease.
[0568] 378. The method of embodiment 377, provided that the subject has been determined to be non-responsive to anti-TNFalpha therapy.
[0569] 379. The method of embodiment 377 or embodiment 378, provided that the subject has been determined to comprise a disease phenotype comprising non-stricturing/non-penetrating, stricturing, stricturing and penetrating, or isolated internal penetrating.
[0570] 380. An antibody or antigen-binding fragment that specifically binds to TL1A, comprising:
[0571] a heavy chain variable region comprising three heavy chain complementarity-determining regions (HCDR1, HCDR2, and HCDR3) comprising
   [0572] (a) a HCDR1 selected from: (i) a HCDR1 comprising SEQ ID NO: 1009, (ii) a HCDR1 comprising SEQ ID NO: 100150, wherein X₁ is selected from D and E, X₂ is selected from I, P and V, X₃ is selected from G, Q, S, and V, X₄ is selected from F and Y, and X₅ is selected from I and M, (iii) a HCDR1 selected from SEQ ID NOS: 100200-100295, and (iv) a HCDR1 comprising an amino acid sequence that differs from a sequence selected from the group consisting of SEQ ID NOS: 1009, 100150 and 100200-100295 by up to five, four, three, or two amino acids,
   [0573] (b) a HCDR2 selected from: (i) a HCDR2 comprising SEQ ID NO: 10012, and (ii) a HCDR2 comprising an amino acid sequence that differs from SEQ ID NO: 10012 by up to five, four, three, or two amino acids, and
   [0574] (c) a HCDR3 selected from (i) a HCDR3 comprising SEQ ID NO: 10015, (ii) a HCDR3 comprising SEQ ID NO: 100152, wherein X₁ is selected from L and M, and X₂ is selected from E, I, K, L, M, Q, T, V, W, and Y, (iii) a HCDR3 selected from SEQ ID NOS: 100296-100314, and (iv) a HCDR3 comprising an amino acid sequence that differs from a sequence selected from the group consisting of SEQ ID NOS: 10015, 100152 and 100296-100314 by up to five, four, three, or two amino acids; and
[0575] a light chain variable region comprising three light chain complementarity-determining regions (LCDR1, LCDR2, and LCDR3) comprising:
   [0576] (a) a LCDR1 selected from: (i) a LCDR1 comprising SEQ ID NO: 10018, and (ii) a LCDR1 comprising an amino acid sequence that differs from SEQ ID NO: 10018 by up to five, four, three, or two amino acids,
   [0577] (b) a LCDR2 selected from: (i) a LCDR2 comprising SEQ ID NO: 10021, and (ii) a LCDR2 comprising an amino acid sequence that differs from SEQ ID NO: 10021 by up to five, four, three, or two amino acids, and
   [0578] (c) a LCDR3 selected from (i) a LCDR3 comprising SEQ ID NO: 10024, (ii) a LCDR3 comprising SEQ ID NO: 100155, wherein X₁ is selected from Q and N, X₂ is selected from D, E, H, N, Q, and S, X₃ is selected from A and G, and X₄ is selected from D, F, K, N, R, S, and T, (iii) a LCDR3 selected from SEQ ID NOS: 100315-100482, and (iv) a LCDR3 comprising an amino acid sequence that differs from a sequence selected from the group consisting of SEQ ID NOS: 10024, 100155, and 100315-100482 by up to five, four, three, or two amino acids.
[0579] 381. The antibody or antigen-binding fragment of embodiment 380, provided that the HCDR1 comprises SEQ ID NO: 100150, the HCDR2 comprises SEQ ID NO: 10012, the HCDR3 comprises SEQ ID NO: 100152, the LCDR1 comprises SEQ ID NO: 10018, the LCDR2 comprises SEQ ID NO: 10021, and the LCDR3 comprises SEQ ID NO: 100155.
[0580] 382. The antibody or antigen-binding fragment of embodiment 380 or embodiment 381, provided that the X₁ of SEQ ID NO: 100150 is D.
[0581] 383. The antibody or antigen-binding fragment of embodiment 380 or embodiment 381 provided that the X₁ of SEQ ID NO: 100150 is E.
[0582] 384. The antibody or antigen-binding fragment of any of embodiments 380-383, provided that the X₂ of SEQ ID NO: 100150 is I.
[0583] 385. The antibody or antigen-binding fragment of any of embodiments 380-383, provided that the X₂ of SEQ ID NO: 100150 is P.
[0584] 386. The antibody or antigen-binding fragment of any of embodiments 380-383, provided that the X₂ of SEQ ID NO: 100150 is V.
[0585] 387. The antibody or antigen-binding fragment of any of embodiments 380-386, provided that the X₃ of SEQ ID NO: 100150 is G.
[0586] 388. The antibody or antigen-binding fragment of any of embodiments 380-386, provided that the X₃ of SEQ ID NO: 100150 is Q.
[0587] 389. The antibody or antigen-binding fragment of any of embodiments 380-386, provided that the X₃ of SEQ ID NO: 100150 is S.
[0588] 390. The antibody or antigen-binding fragment of any of embodiments 380-386, provided that the X₃ of SEQ ID NO: 100150 is V.
[0589] 391. The antibody or antigen-binding fragment of any of embodiments 380-390, provided that the X₄ of SEQ ID NO: 100150 is F.
[0590] 392. The antibody or antigen-binding fragment of any of embodiments 380-390, provided that the X₄ of SEQ ID NO: 100150 is Y.
[0591] 393. The antibody or antigen-binding fragment of any of embodiments 380-392, provided that the X₅ of SEQ ID NO: 100150 is I.
[0592] 394. The antibody or antigen-binding fragment of any of embodiments 380-392, provided that the X₅ of SEQ ID NO: 100150 is M.
[0593] 395. The antibody or antigen-binding fragment of any of embodiments 380-394, provided that the X₁ of SEQ ID NO: 100152 is L.
[0594] 396. The antibody or antigen-binding fragment of any of embodiments 380-394, provided that the X₁ of SEQ ID NO: 100152 is M.
[0595] 397. The antibody or antigen-binding fragment of any of embodiments 380-3%, provided that the X₂ of SEQ ID NO: 100152 is E.
[0596] 398. The antibody or antigen-binding fragment of any of embodiments 380-3%, provided that the X₂ of SEQ ID NO: 100152 is I.
[0597] 399. The antibody or antigen-binding fragment of any of embodiments 380-3%, provided that the X₂ of SEQ ID NO: 100152 is K.
[0598] 400. The antibody or antigen-binding fragment of any of embodiments 380-3%, provided that the X₂ of SEQ ID NO: 100152 is L.
[0599] 401. The antibody or antigen-binding fragment of any of embodiments 380-3%, provided that the X₂ of SEQ ID NO: 100152 is M.
[0600] 402. The antibody or antigen-binding fragment of any of embodiments 380-3%, provided that the X₂ of SEQ ID NO: 100152 is Q.
[0601] 403. The antibody or antigen-binding fragment of any of embodiments 380-3%, provided that the X₂ of SEQ ID NO: 100152 is T.
[0602] 404. The antibody or antigen-binding fragment of any of embodiments 380-3%, provided that the X₂ of SEQ ID NO: 100152 is V.
[0603] 405. The antibody or antigen-binding fragment of any of embodiments 380-3%, provided that the X₂ of SEQ ID NO: 100152 is W.
[0604] 406. The antibody or antigen-binding fragment of any of embodiments 380-3%, provided that the X₂ of SEQ ID NO: 100152 is Y.
[0605] 407. The antibody or antigen-binding fragment of any of embodiments 380-406, provided that the X₁ of SEQ ID NO: 100155 is Q.
[0606] 408. The antibody or antigen-binding fragment of any of embodiments 380-406, provided that the X₁ of SEQ ID NO: 100155 is N.
[0607] 409. The antibody or antigen-binding fragment of any of embodiments 380-408, provided that the X₂ of SEQ ID NO: 100155 is D.
[0608] 410. The antibody or antigen-binding fragment of any of embodiments 380-408, provided that the X₂ of SEQ ID NO: 100155 is E.
[0609] 411. The antibody or antigen-binding fragment of any of embodiments 380-408, provided that the X₂ of SEQ ID NO: 100155 is H.
[0610] 412. The antibody or antigen-binding fragment of any of embodiments 380-408, provided that the X₂ of SEQ ID NO: 100155 is N.
[0611] 413. The antibody or antigen-binding fragment of any of embodiments 380-408, provided that the X₂ of SEQ ID NO: 100155 is Q.
[0612] 414. The antibody or antigen-binding fragment of any of embodiments 380-408, provided that the X₂ of SEQ ID NO: 100155 is S.
[0613] 415. The antibody or antigen-binding fragment of any of embodiments 380-414, provided that the X₃ of SEQ ID NO: 100155 is A.
[0614] 416. The antibody or antigen-binding fragment of any of embodiments 380-414, provided that the X₃ of SEQ ID NO: 100155 is G.
[0615] 417. The antibody or antigen-binding fragment of any of embodiments 380-416, provided that the X₄ of SEQ ID NO: 100155 is D.
[0616] 418. The antibody or antigen-binding fragment of any of embodiments 380-416, provided that the X₄ of SEQ ID NO: 100155 is F.
[0617] 419. The antibody or antigen-binding fragment of any of embodiments 380-416, provided that the X₄ of SEQ ID NO: 100155 is K.
[0618] 420. The antibody or antigen-binding fragment of any of embodiments 380-416, provided that the X₄ of SEQ ID NO: 100155 is N.
[0619] 421. The antibody or antigen-binding fragment of any of embodiments 380-416, provided that the X₄ of SEQ ID NO: 100155 is R.
[0620] 422. The antibody or antigen-binding fragment of any of embodiments 380-416, provided that the X₄ of SEQ ID NO: 100155 is S.
[0621] 423. The antibody or antigen-binding fragment of any of embodiments 380-416, provided that the X₄ of SEQ ID NO: 100155 is T.
[0622] 424. The antibody or antigen-binding fragment of any of embodiments 380-423, provided that the antibody or antigen-binding fragment specifically binds to human TL1A.
[0623] 425. The antibody or antigen-binding fragment of embodiment 424, provided that the antibody or antigen-binding fragment specifically binds to human TL1A with a K_{d} of 1×10⁻⁹ M or less.
[0624] 426. The antibody or antigen-binding fragment of embodiment 425, provided that the K_{d} is measured using a method selected from a standard ELISA assay and SPR.
[0625] 427. The antibody or antigen-binding fragment of any of embodiments 380-426, provided that the antibody or antigen-binding fragment inhibits binding of DR3 to human TL1A.
[0626] 428. The antibody or antigen-binding fragment of any of embodiments 380-427, provided that the antibody or antigen-binding fragment inhibits binding of DcR3 to human TL1A.
[0627] 429. The antibody or antigen-binding fragment of any of embodiments 380-428, provided that the antibody or antigen-binding fragment is a humanized antibody, a CDR-grafted antibody, a chimeric antibody, a Fab, a ScFv, or a combination thereof.
[0628] 430. The antibody or antigen-binding fragment of any of embodiments 380-429, comprising a human CH1 domain.
[0629] 431. The antibody or antigen-binding fragment of any of embodiments 380-430, comprising a human CH2 domain.
[0630] 432. The antibody or antigen-binding fragment of embodiment 431, provided that that CH2 domain comprises at least one mutation selected from L234A, L235A, and G237A, as numbered using Kabat.
[0631] 433. The antibody or antigen-binding fragment of any of embodiments 380-432, comprising a human CH3 domain.
[0632] 434. A pharmaceutical composition comprising a therapeutically effective amount of the antibody or antigen-binding fragment of any of embodiments 380-433, and a pharmaceutically acceptable carrier.
[0633] 435. A method of treating an inflammatory disease in a subject in need thereof, comprising administering to the subject a therapeutically effective amount of the antibody or antigen-binding fragment of any of embodiments 380-433.
[0634] 436. The method of embodiment 435, provided that the inflammatory disease is inflammatory bowel disease.
[0635] 437. The method of embodiment 436, provided that the inflammatory bowel disease comprises Crohn's disease.
[0636] 438. The method of embodiment 437, provided that the subject has been determined to be non-responsive to anti-TNFalpha therapy.
[0637] 439. The method of embodiment 437 or embodiment 438, provided that the subject has been determined to comprise a disease phenotype comprising non-stricturing/non-penetrating, stricturing, stricturing and penetrating, or isolated internal penetrating.
[0638] 440. An antibody or antigen-binding fragment that specifically binds to TL1A, comprising: a heavy chain variable region comprising SEQ ID NO: 10052 or SEQ ID NO: 10054, and a light chain variable region comprising SEQ ID NO: 10053.
[0639] 441. The antibody or antigen-binding fragment of embodiment 440, provided that the heavy chain variable region comprises SEQ ID NO: 10052.
[0640] 442. The antibody or antigen-binding fragment of embodiment 440, provided that the heavy chain variable region comprises SEQ ID NO: 10054.
[0641] 443. The antibody or antigen-binding fragment of any of embodiments 440-442, provided that the X₁ of SEQ ID NO: 10052 or SEQ ID NO: 10054 is D.
[0642] 444. The antibody or antigen-binding fragment of any of embodiments 440-442 provided that the X₁ of SEQ ID NO: 10052 or SEQ ID NO: 10054 is E.
[0643] 445. The antibody or antigen-binding fragment of any of embodiments 440-444, provided that the X₂ of SEQ ID NO: 10052 or SEQ ID NO: 10054 is I.
[0644] 446. The antibody or antigen-binding fragment of any of embodiments 440-444, provided that the X₂ of SEQ ID NO: 10052 or SEQ ID NO: 10054 is P.
[0645] 447. The antibody or antigen-binding fragment of any of embodiments 440-444, provided that the X₂ of SEQ ID NO: 10052 or SEQ ID NO: 10054 is V.
[0646] 448. The antibody or antigen-binding fragment of any of embodiments 440-447, provided that the X₃ of SEQ ID NO: 10052 or SEQ ID NO: 10054 is G.
[0647] 449. The antibody or antigen-binding fragment of any of embodiments 440-447, provided that the X₃ of SEQ ID NO: 10052 or SEQ ID NO: 10054 is Q.
[0648] 450. The antibody or antigen-binding fragment of any of embodiments 440-447, provided that the X₃ of SEQ ID NO: 10052 or SEQ ID NO: 10054 is S.
[0649] 451. The antibody or antigen-binding fragment of any of embodiments 440-447, provided that the X₃ of SEQ ID NO: 10052 or SEQ ID NO: 10054 is V.
[0650] 452. The antibody or antigen-binding fragment of any of embodiments 440-451, provided that the X₄ of SEQ ID NO: 10052 or SEQ ID NO: 10054 is F.
[0651] 453. The antibody or antigen-binding fragment of any of embodiments 440-451, provided that the X₄ of SEQ ID NO: 10052 or SEQ ID NO: 10054 is Y.
[0652] 454. The antibody or antigen-binding fragment of any of embodiments 440-453, provided that the X₅ of SEQ ID NO: 10052 or SEQ ID NO: 10054 is I.
[0653] 455. The antibody or antigen-binding fragment of any of embodiments 440-453, provided that the X₅ of SEQ ID NO: 10052 or SEQ ID NO: 10054 is M.
[0654] 456. The antibody or antigen-binding fragment of any of embodiments 440-455, provided that the X₆ of SEQ ID NO: 10052 or SEQ ID NO: 10054 is L.
[0655] 457. The antibody or antigen-binding fragment of any of embodiments 440-455, provided that the X₆ of SEQ ID NO: 10052 or SEQ ID NO: 10054 is M.
[0656] 458. The antibody or antigen-binding fragment of any of embodiments 440-457, provided that the X₇ of SEQ ID NO: 10052 or SEQ ID NO: 10054 is E.
[0657] 459. The antibody or antigen-binding fragment of any of embodiments 440-457, provided that the X₇ of SEQ ID NO: 10052 or SEQ ID NO: 10054 is I.
[0658] 460. The antibody or antigen-binding fragment of any of embodiments 440-457, provided that the X₇ of SEQ ID NO: 10052 or SEQ ID NO: 10054 is K.
[0659] 461. The antibody or antigen-binding fragment of any of embodiments 440-457, provided that the X₇ of SEQ ID NO: 10052 or SEQ ID NO: 10054 is L.
[0660] 462. The antibody or antigen-binding fragment of any of embodiments 440-457, provided that the X₇ of SEQ ID NO: 10052 or SEQ ID NO: 10054 is M.
[0661] 463. The antibody or antigen-binding fragment of any of embodiments 440-457, provided that the X₇ of SEQ ID NO: 10052 or SEQ ID NO: 10054 is Q.
[0662] 464. The antibody or antigen-binding fragment of any of embodiments 440-457, provided that the X₇ of SEQ ID NO: 10052 or SEQ ID NO: 10054 is T.
[0663] 465. The antibody or antigen-binding fragment of any of embodiments 440-457, provided that the X₇ of SEQ ID NO: 10052 or SEQ ID NO: 10054 is V.
[0664] 466. The antibody or antigen-binding fragment of any of embodiments 440-457, provided that the X₇ of SEQ ID NO: 10052 or SEQ ID NO: 10054 is W.
[0665] 467. The antibody or antigen-binding fragment of any of embodiments 440-457, provided that the X₇ of SEQ ID NO: 10052 or SEQ ID NO: 10054 is Y.
[0666] 468. The antibody or antigen-binding fragment of any of embodiments 440-467, provided that the X₁ of SEQ ID NO: 10053 is Q.
[0667] 469. The antibody or antigen-binding fragment of any of embodiments 440-467, provided that the X₁ of SEQ ID NO: 10053 is N.
[0668] 470. The antibody or antigen-binding fragment of any of embodiments 440-469, provided that the X₂ of SEQ ID NO: 10053 is D.
[0669] 471. The antibody or antigen-binding fragment of any of embodiments 440-469, provided that the X₂ of SEQ ID NO: 10053 is E.
[0670] 472. The antibody or antigen-binding fragment of any of embodiments 440-469, provided that the X₂ of SEQ ID NO: 10053 is H.
[0671] 473. The antibody or antigen-binding fragment of any of embodiments 440-469, provided that the X₂ of SEQ ID NO: 10053 is N.
[0672] 474. The antibody or antigen-binding fragment of any of embodiments 440-469, provided that the X₂ of SEQ ID NO: 10053 is Q.
[0673] 475. The antibody or antigen-binding fragment of any of embodiments 440-469, provided that the X₂ of SEQ ID NO: 10053 is S.
[0674] 476. The antibody or antigen-binding fragment of any of embodiments 440-475, provided that the X₃ of SEQ ID NO: 10053 is A.
[0675] 477. The antibody or antigen-binding fragment of any of embodiments 440-475, provided that the X₃ of SEQ ID NO: 10053 is G.
[0676] 478. The antibody or antigen-binding fragment of any of embodiments 440-477, provided that the X₄ of SEQ ID NO: 10053 is D.
[0677] 479. The antibody or antigen-binding fragment of any of embodiments 440-477, provided that the X₄ of SEQ ID NO: 10053 is F.
[0678] 480. The antibody or antigen-binding fragment of any of embodiments 440-477, provided that the X₄ of SEQ ID NO: 10053 is K.
[0679] 481. The antibody or antigen-binding fragment of any of embodiments 440-477, provided that the X₄ of SEQ ID NO: 10053 is N.
[0680] 482. The antibody or antigen-binding fragment of any of embodiments 440-477, provided that the X₄ of SEQ ID NO: 10053 is R.
[0681] 483. The antibody or antigen-binding fragment of any of embodiments 440-477, provided that the X₄ of SEQ ID NO: 10053 is S.
[0682] 484. The antibody or antigen-binding fragment of any of embodiments 440-477, provided that the X₄ of SEQ ID NO: 10053 is T.
[0683] 485. An antibody or antigen-binding fragment that specifically binds to TL1A, comprising: a heavy chain variable region of SEQ ID NO: 10036, and a light chain variable region of SEQ ID NO: 10038.
[0684] 486. An antibody or antigen-binding fragment that specifically binds to TL1A, comprising: a heavy chain variable region of SEQ ID NO: 10040, and a light chain variable region of SEQ ID NO: 10042.
[0685] 487. An antibody or antigen-binding fragment that specifically binds to TL1A, comprising: a heavy chain variable region of SEQ ID NO: 10040, and a light chain variable region of SEQ ID NO: 10038.
[0686] 488. An antibody or antigen-binding fragment that specifically binds to TL1A, comprising: a heavy chain variable region of SEQ ID NO: 10044, and a light chain variable region of SEQ ID NO: 10038.
[0687] 489. An antibody or antigen-binding fragment that specifically binds to TL1A, comprising: a heavy chain variable region of SEQ ID NO: 10043, and a light chain variable region of SEQ ID NO: 10038.
[0688] 490. An antibody or antigen-binding fragment that specifically binds to TL1A, comprising: a heavy chain variable region of SEQ ID NO: 10045, and a light chain variable region of SEQ ID NO: 10038.
[0689] 491. An antibody or antigen-binding fragment that specifically binds to TL1A, comprising: a heavy chain variable region of SEQ ID NO: 10046, and a light chain variable region of SEQ ID NO: 10038.
[0690] 492. An antibody or antigen-binding fragment that specifically binds to TL1A, comprising: a heavy chain variable region of SEQ ID NO: 10040, and a light chain variable region of SEQ ID NO: 10047.
[0691] 493. An antibody or antigen-binding fragment that specifically binds to TL1A, comprising: a heavy chain variable region of SEQ ID NO: 10040, and a light chain variable region of SEQ ID NO: 10048.
[0692] 494. An antibody or antigen-binding fragment that specifically binds to TL1A, comprising: a heavy chain variable region of SEQ ID NO: 10040, and a light chain variable region of SEQ ID NO: 10049.
[0693] 495. An antibody or antigen-binding fragment that specifically binds to TL1A, comprising: a heavy chain variable region of SEQ ID NO: 10040, and a light chain variable region of SEQ ID NO: 10050.
[0694] 496. An antibody or antigen-binding fragment that specifically binds to TL1A, comprising: a heavy chain variable region of SEQ ID NO: 10040, and a light chain variable region of SEQ ID NO: 10051.
[0695] 497. The antibody or antigen-binding fragment of any of embodiments 440-4%, provided that the antibody or antigen-binding fragment specifically binds to human TL1A.
[0696] 498. The antibody or antigen-binding fragment of embodiment 497, provided that the antibody or antigen-binding fragment specifically binds to human TL1A with a K_{d} of 1×10⁻⁹ M or less.
[0697] 499. The antibody or antigen-binding fragment of embodiment 498, provided that the K_{d} is measured using a method selected from a standard ELISA assay and SPR.
[0698] 500. The antibody or antigen-binding fragment of any of embodiments 440-499, provided that the antibody or antigen-binding fragment inhibits binding of DR3 to human TL1A.
[0699] 501. The antibody or antigen-binding fragment of any of embodiments 440-500, provided that the antibody or antigen-binding fragment inhibits binding of DcR3 to human TL1A.
[0700] 502. The antibody or antigen-binding fragment of any of embodiments 440-501, provided that the antibody or antigen-binding fragment is a humanized antibody, a CDR-grafted antibody, a chimeric antibody, a Fab, a ScFv, or a combination thereof.
[0701] 503. The antibody or antigen-binding fragment of any of embodiments 440-502, comprising a human CH1 domain.
[0702] 504. The antibody or antigen-binding fragment of any of embodiments 440-503, comprising a human CH2 domain.
[0703] 505. The antibody or antigen-binding fragment of embodiment 504, provided that that CH2 domain comprises at least one mutation selected from L234A, L235A, and G237A, as numbered using Kabat.
[0704] 506. The antibody or antigen-binding fragment of any of embodiments 440-505, comprising a human CH3 domain.
[0705] 507. A pharmaceutical composition comprising a therapeutically effective amount of the antibody or antigen-binding fragment of any of embodiments 440-506, and a pharmaceutically acceptable carrier.
[0706] 508. A method of treating an inflammatory disease in a subject in need thereof, comprising administering to the subject a therapeutically effective amount of the antibody or antigen-binding fragment of any of embodiments 440-506.
[0707] 509. The method of embodiment 508, provided that the inflammatory disease is inflammatory bowel disease.
[0708] 510. The method of embodiment 509, provided that the inflammatory bowel disease comprises Crohn's disease.
[0709] 511. The method of embodiment 510, provided that the subject has been determined to be non-responsive to anti-TNFalpha therapy.
[0710] 512. The method of embodiment 510 or embodiment 511, provided that the subject has been determined to comprise a disease phenotype comprising non-stricturing/non-penetrating, stricturing, stricturing and penetrating, or isolated internal penetrating.
[0711] 513. An antibody or antigen binding fragment that binds to the same region of human TL1A as a reference antibody of any of embodiments 1-112, 119-199, 206-286, 293-373, 380-433, and 440-506.
[0712] 514. An antibody or antigen binding fragment that binds to the same region of human TL1A as a reference antibody comprising a heavy chain variable region of SEQ ID NO: 10036, and a light chain variable region of SEQ ID NO: 10038.
[0713] 515. An antibody or antigen binding fragment that binds to the same region of human TL1A as a reference antibody comprising a heavy chain variable region of SEQ ID NO: 10040, and a light chain variable region of SEQ ID NO: 10042.
[0714] 516. An antibody or antigen binding fragment that binds to the same region of human TL1A as a reference antibody comprising a heavy chain variable region of SEQ ID NO: 10040, and a light chain variable region of SEQ ID NO: 10038.
[0715] 517. An antibody or antigen-binding fragment that specifically binds to TL1A, comprising:
[0716] a heavy chain variable region comprising:
   [0717] (a) an HCDR1 comprising an amino acid sequence set forth by SEQ ID NO: 553;
   [0718] (b) an HCDR2 comprising an amino acid sequence set forth by any one of SEQ ID NOs: 554 to 564 or 574 to 577; and
   [0719] (c) an HCDR3 comprising an amino acid sequence set forth by any one of SEQ ID NOs: 565 to 568 or 578 to 581; and
[0720] a light chain variable region comprising:
   [0721] (d) an LCDR1 comprising an amino acid sequence set forth by any one of SEQ ID NOs: 569 or 570;
   [0722] (e) an LCDR2 comprising an amino acid sequence set forth by SEQ ID NO: 488; and
   [0723] (f) an LCDR3 comprising an amino acid sequence set forth by any one of SEQ ID NOs: 571 to 573 or 582 to 585.
[0724] 518. An antibody or antigen-binding fragment that specifically binds to TL1A, comprising:
[0725] a heavy chain variable region comprising:
   [0726] (a) an HCDR1 comprising an amino acid sequence set forth by SEQ ID NO: 553;
   [0727] (b) an HCDR2 comprising an amino acid sequence set forth by SEQ ID NO: 559; and
   [0728] (c) an HCDR3 comprising an amino acid sequence set forth by SEQ ID NO: 567; and a light chain variable region comprising:
   [0729] (d) an LCDR1 comprising an amino acid sequence set forth by SEQ ID NO: 569;
   [0730] (e) an LCDR2 comprising an amino acid sequence set forth by SEQ ID NO: 488; and
   [0731] (f) an LCDR3 comprising an amino acid sequence set forth by any one of SEQ ID NO: 573.
[0732] 519. An antibody or antigen-binding fragment that specifically binds to TL1A, comprising:
[0733] a heavy chain variable region comprising:
   [0734] (a) an HCDR1 comprising an amino acid sequence set forth by SEQ ID NO: 553;
   [0735] (b) an HCDR2 comprising an amino acid sequence set forth by SEQ ID NO: 563; and
   [0736] (c) an HCDR3 comprising an amino acid sequence set forth by SEQ ID NO: 568; and
[0737] a light chain variable region comprising:
   [0738] (d) an LCDR1 comprising an amino acid sequence set forth by SEQ ID NO: 569;
   [0739] (e) an LCDR2 comprising an amino acid sequence set forth by SEQ ID NO: 488; and
   [0740] (f) an LCDR3 comprising an amino acid sequence set forth by any one of SEQ ID NO: 572.
[0741] 520. An antibody or antigen-binding fragment that specifically binds to TL1A, comprising:
[0742] a heavy chain variable region comprising:
   [0743] (a) an HCDR1 comprising an amino acid sequence set forth by SEQ ID NO: 553;
   [0744] (b) an HCDR2 comprising an amino acid sequence set forth by SEQ ID NO: 555; and
   [0745] (c) an HCDR3 comprising an amino acid sequence set forth by SEQ ID NO: 566; and
[0746] a light chain variable region comprising:
   [0747] (d) an LCDR1 comprising an amino acid sequence set forth by SEQ ID NO: 569;
   [0748] (e) an LCDR2 comprising an amino acid sequence set forth by SEQ ID NO: 488; and
   [0749] (f) an LCDR3 comprising an amino acid sequence set forth by any one of SEQ ID NO: 572.
[0750] 521. An antibody or antigen-binding fragment that specifically binds to TL1A, comprising:
[0751] a heavy chain variable region comprising:
   [0752] (a) an HCDR1 comprising an amino acid sequence set forth by SEQ ID NO: 553;
   [0753] (b) an HCDR2 comprising an amino acid sequence set forth by SEQ ID NO: 558; and
   [0754] (c) an HCDR3 comprising an amino acid sequence set forth by SEQ ID NO: 566; and
[0755] a light chain variable region comprising:
   [0756] (d) an LCDR1 comprising an amino acid sequence set forth by SEQ ID NO: 569;
   [0757] (e) an LCDR2 comprising an amino acid sequence set forth by SEQ ID NO: 488; and
   [0758] (f) an LCDR3 comprising an amino acid sequence set forth by any one of SEQ ID NO: 572.
[0759] 522. An antibody or antigen-binding fragment that specifically binds to TL1A, comprising:
[0760] a heavy chain variable region comprising:
   [0761] (a) an HCDR1 comprising an amino acid sequence set forth by SEQ ID NO: 553;
   [0762] (b) an HCDR2 comprising an amino acid sequence set forth by SEQ ID NO: 564; and
   [0763] (c) an HCDR3 comprising an amino acid sequence set forth by SEQ ID NO: 568; and
[0764] a light chain variable region comprising:
   [0765] (d) an LCDR1 comprising an amino acid sequence set forth by SEQ ID NO: 569;
   [0766] (e) an LCDR2 comprising an amino acid sequence set forth by SEQ ID NO: 488; and
   [0767] (f) an LCDR3 comprising an amino acid sequence set forth by any one of SEQ ID NO: 572.
[0768] 523. An antibody or antigen-binding fragment that specifically binds to TL1A, comprising:
   [0769] (a) a heavy chain variable region comprising an HCDR1, an HCDR2, and an HCDR3 from any one of SEQ ID NOs: 491, 493, 495, 497, 499, 501, 503, 505, 507, 509, 511, 513, 515, 517, 519, 521, 523, 525, 527, 529, 531, 533, 535, 537, 539, or 541; and
   [0770] (b) a light chain variable region comprising an LCDR1, an LCDR2, and an LCDR3 from any one of SEQ ID NOs: 490, 492, 494, 496, 498, 500, 502, 504, 506, 508, 510, 512, 514, 516, 518, 520, 522, 524, 526, 528, 530, 532, 534, 536, 538, or 540; wherein the CDRs are defined by the Kabat, Chothia, or IMGT method or a combination thereof.
[0771] 524. The antibody or antigen-binding fragment of any one of embodiments 517 to 523, comprising a human heavy chain framework region 1 that is at least 90%, 95%, 96%, 97%, 98%, 99% identical to that set forth is SEQ ID NO: 545.
[0772] 525. The antibody or antigen-binding fragment of any one of embodiments 517 to 524, comprising a human heavy chain framework region 2 that is at least 90%, 95%, 96%, 97%, 98%, 99% identical to that set forth is SEQ ID NO: 546.
[0773] 526. The antibody or antigen-binding fragment of any one of embodiments 517 to 525, comprising a human heavy chain framework region 3 that is at least 90%, 95%, 96%, 97%, 98%, 99% identical to that set forth is SEQ ID NO: 547 or 586 to 588.
[0774] 527. The antibody or antigen-binding fragment of any one of embodiments 517 to 526, comprising a human heavy chain framework region 4 that is at least 90%, 95%, 96%, 97%, 98%, 99% identical to that set forth is SEQ ID NO: 548.
[0775] 528. The antibody or antigen-binding fragment of any one of embodiments 517 to 527, comprising a human light chain framework region 1 that is at least 90%, 95%, 96%, 97%, 98%, 99% identical to that set forth is SEQ ID NO: 549.
[0776] 529. The antibody or antigen-binding fragment of any one of embodiments 517 to 528, comprising a human light chain framework region 2 that is at least 90%, 95%, 96%, 97%, 98%, 99% identical to that set forth is SEQ ID NO: 550.
[0777] 530. The antibody or antigen-binding fragment of any one of embodiments 517 to 529, comprising a human light chain framework region 3 that is at least 90%, 95%, 96%, 97%, 98%, 99% identical to that set forth is SEQ ID NO: 551.
[0778] 531. The antibody or antigen-binding fragment of any one of embodiments 517 to 530, comprising a human light chain framework region 4 that is at least 90%, 95%, 96%, 97%, 98%, 99% identical to that set forth is SEQ ID NO: 552.
[0779] 532. The antibody or antigen-binding fragment of any one of embodiments 517 to 531, comprising:
   [0780] (a) a human heavy chain framework region 1 that is at least 90% identical to that set forth is SEQ ID NO: 545;
   [0781] (b) a human heavy chain framework region 2 that is at least 90% identical to that set forth is SEQ ID NO: 546;
   [0782] (c) a human heavy chain framework region 3 that is at least 90% identical to that set forth is SEQ ID NO: 547 or 586 to 588;
   [0783] (d) a human heavy chain framework region 4 that is at least 90% identical to that set forth is SEQ ID NO: 548;
   [0784] (e) a human light chain framework region 1 that is at least 90% identical to that set forth is SEQ ID NO: 549;
   [0785] (f) a human light chain framework region 2 that is at least 90% identical to that set forth is SEQ ID NO: 550;
   [0786] (g) a human light chain framework region 3 that is at least 90% identical to that set forth is SEQ ID NO: 551; and
   [0787] (h) a human light chain framework region 4 that is at least 90% identical to that set forth is SEQ ID NO: 552.
[0788] 533. The antibody or antigen-binding fragment of embodiment 532, comprising:
   [0789] (a) a human heavy chain framework region 1 that is at least 95% identical to that set forth is SEQ ID NO: 545;
   [0790] (b) a human heavy chain framework region 2 that is at least 95% identical to that set forth is SEQ ID NO: 546;
   [0791] (c) a human heavy chain framework region 3 that is at least 95% identical to that set forth is SEQ ID NO: 547 or 586 to 588;
   [0792] (d) a human heavy chain framework region 4 that is at least 95% identical to that set forth is SEQ ID NO: 548;
   [0793] (e) a human light chain framework region 1 that is at least 95% identical to that set forth is SEQ ID NO: 549;
   [0794] (f) a human light chain framework region 2 that is at least 95% identical to that set forth is SEQ ID NO: 550;
   [0795] (g) a human light chain framework region 3 that is at least 95% identical to that set forth is SEQ ID NO: 551; and
   [0796] (h) a human light chain framework region 4 that is at least 95% identical to that set forth is SEQ ID NO: 552.
[0797] 534. The antibody or antigen-binding fragment of embodiments 532, comprising:
   [0798] (a) a human heavy chain framework region 1 that is at least 97% identical to that set forth is SEQ ID NO: 545;
   [0799] (b) a human heavy chain framework region 2 that is at least 97% identical to that set forth is SEQ ID NO: 546;
   [0800] (c) a human heavy chain framework region 3 that is at least 97% identical to that set forth is SEQ ID NO: 547 or 586 to 588;
   [0801] (d) a human heavy chain framework region 4 that is at least 97% identical to that set forth is SEQ ID NO: 548;
   [0802] (e) a human light chain framework region 1 that is at least 97% identical to that set forth is SEQ ID NO: 549;
   [0803] (f) a human light chain framework region 2 that is at least 97% identical to that set forth is SEQ ID NO: 550;
   [0804] (g) a human light chain framework region 3 that is at least 97% identical to that set forth is SEQ ID NO: 551; and
   [0805] (h) a human light chain framework region 4 that is at least 97% identical to that set forth is SEQ ID NO: 552.
[0806] 535. The antibody or antigen-binding fragment of embodiment 532, comprising:
   [0807] (a) a human heavy chain framework region 1 that is at least 98% identical to that set forth is SEQ ID NO: 545;
   [0808] (b) a human heavy chain framework region 2 that is at least 98% identical to that set forth is SEQ ID NO: 546;
   [0809] (c) a human heavy chain framework region 3 that is at least 98% identical to that set forth is SEQ ID NO: 547 or 586 to 588;
   [0810] (d) a human heavy chain framework region 4 that is at least 98% identical to that set forth is SEQ ID NO: 548;
   [0811] (e) a human light chain framework region 1 that is at least 98% identical to that set forth is SEQ ID NO: 549;
   [0812] (f) a human light chain framework region 2 that is at least 98% identical to that set forth is SEQ ID NO: 550;
   [0813] (g) a human light chain framework region 3 that is at least 98% identical to that set forth is SEQ ID NO: 551; and
   [0814] (h) a human light chain framework region 4 that is at least 98% identical to that set forth is SEQ ID NO: 552.
[0815] 536. An antibody or antigen-binding fragment that specifically binds to TL1A, comprising:
   [0816] (a) a heavy chain variable region comprising an amino acid sequence at least about 85%, 90%, 95%, 97%, 98%, 99%, or 100% identical to any one of SEQ ID NOs: 491, 493, 495,497,499,501,503,505,507,509,511,513,515,517,519, 521, 523, 525, 527, 529, 531, 533, 535, 537, 539, or 541; and
   [0817] (b) a light chain variable region comprising an amino acid sequence at least about 85%, 90%, 95%, 97%, 98%, 99%, or 100% identical to any one of SEQ ID NOs: 490, 492, 494, 496, 498, 500, 502, 504, 506, 508, 510,512, 514, 516, 518, 520, 522, 524, 526, 528, 530, 532, 534, 536, 538, or 540.
[0818] 537. An antibody or antigen-binding fragment that specifically binds to TL1A, comprising:
   [0819] (a) a heavy chain variable region comprising an amino acid sequence at least about 85%, 90%, 95%, 97%, 98%, 99%, or 100% identical to SEQ ID NO: 503; and
   [0820] (b) a light chain variable region comprising an amino acid sequence at least about 85%, 90%, 95%, 97%, 98%, 99%, or 100% identical to SEQ ID NO: 502.
[0821] 538. An antibody or antigen-binding fragment that specifically binds to TL1A, comprising:
   [0822] (a) a heavy chain variable region comprising an amino acid sequence at least about 85%, 90%, 95%, 97%, 98%, 99%, or 100% identical to SEQ ID NO: 511; and
   [0823] (b) a light chain variable region comprising an amino acid sequence at least about 85%, 90%, 95%, 97%, 98%, 99%, or 100% identical to SEQ ID NO: 510.
[0824] 539. An antibody or antigen-binding fragment that specifically binds to TL1A, comprising:
   [0825] (a) a heavy chain variable region comprising an amino acid sequence at least about 85%, 90%, 95%, 97%, 98%, 99%, or 100% identical to SEQ ID NO: 493; and
   [0826] (b) a light chain variable region comprising an amino acid sequence at least about 85%, 90%, 95%, 97%, 98%, 99%, or 100% identical to SEQ ID NO: 492.
[0827] 540. An antibody or antigen-binding fragment that specifically binds to TL1A, comprising:
   [0828] (a) a heavy chain variable region comprising an amino acid sequence at least about 85%, 90%, 95%, 97%, 98%, 99%, or 100% identical to SEQ ID NO: 501; and
   [0829] (b) a light chain variable region comprising an amino acid sequence at least about 85%, 90%, 95%, 97%, 98%, 99%, or 100% identical to SEQ ID NO: 500.
[0830] 541. An antibody or antigen-binding fragment that specifically binds to TL1A, comprising:
   [0831] (a) a heavy chain variable region comprising an amino acid sequence at least about 85%, 90%, 95%, 97%, 98%, 99%, or 100% identical to SEQ ID NO: 515; and
   [0832] (b) a light chain variable region comprising an amino acid sequence at least about 85%, 90%, 95%, 97%, 98%, 99%, or 100% identical to SEQ ID NO: 514.
[0833] 542. The antibody or antigen-binding fragment of any one of embodiments 517 to 541, wherein the antibody or antigen-binding fragment is chimeric or humanized.
[0834] 543. The antibody or antigen-binding fragment of any one of embodiments 517 to 541, wherein the antibody or antigen-binding fragment is an IgG antibody.
[0835] 544. The antibody or antigen-binding fragment of any one of embodiments 517 to 541, wherein the antibody or antigen-binding fragment comprises a Fab, F(ab)₂, a single-domain antibody, a single chain variable fragment (scFv), or a nanobody.
[0836] 545. The antibody or antigen-binding fragment of any one of embodiments 517 to 544, comprising a heavy chain constant region comprising an amino acid sequence as set forth by SEQ ID NO: 542 or 543.
[0837] 546. The antibody or antigen-binding fragment of any one of embodiments 517 to 544, comprising a heavy chain constant region comprising an amino acid sequence as set forth by SEQ ID NO: 542.
[0838] 547. The antibody or antigen-binding fragment of any one of embodiments 517 to 544, comprising alight chain constant region comprising an amino acid sequence as set forth by SEQ ID NO: 544.

[0839] Non-limiting methods for determining whether an anti-TL1A antibody binds to the same region of a reference antibody are known in the art. An exemplary method comprises a competition assay. For instance, the method comprises determining whether a reference antibody can compete with binding between the reference antibody and the TL1A protein or portion thereof, or determining whether the reference antibody can compete with binding between the reference antibody and the TL1A protein or portion thereof. Exemplary methods include use of surface plasmon resonance to evaluate whether an anti-TL1A antibody can compete with the binding between TL1A and another anti-TL1A antibody. In some cases, surface plasmon resonance is utilized in the competition assay.

### Pharmaceutical Compositions, Formulations, and Methods of Administration

[0840] In one aspect, a method for treating any of the diseases or conditions described herein in a subject in need of such treatment, involves administration of pharmaceutical compositions that include a therapeutic agent described herein, e.g., an inhibitor of CD30L, in therapeutically effective amounts to said subject. In some embodiments, a therapeutic agent described herein is used in the preparation of medicaments for treating an inflammatory disease, fibrostenotic disease, and/or fibrotic disease. Pharmaceutical compositions as used herein include compositions comprising an inhibitor of CD30L and optionally an additional therapeutic agent.

[0841] In certain embodiments, the compositions containing the therapeutic agent described herein are administered for prophylactic and/or therapeutic treatments. In certain therapeutic applications, the compositions are administered to a patient already suffering from a disease or condition, in an amount sufficient to cure or at least partially arrest at least one of the symptoms of the disease or condition. Amounts effective for this use depend on the severity and course of the disease or condition, previous therapy, the patient's health status, weight, and response to the drugs, and the judgment of the treating physician. Therapeutically effective amounts are optionally determined by methods including, but not limited to, a dose escalation clinical trial. In some cases, an inhibitor of CD30L is administered to a patient suffering from an inflammatory disease, fibrostenotic disease, and/or fibrotic disease.

[0842] In prophylactic applications, compositions containing a therapeutic agent described herein are administered to a patient susceptible to or otherwise at risk of a particular disease, disorder or condition, e.g., an inflammatory disease, fibrostenotic disease, and/or fibrotic disease. Such an amount is defined to be a “prophylactically effective amount or dose.” In this use, the precise amounts also depend on the patient's state of health, weight, and the like. When used in a patient, effective amounts for this use will depend on the severity and course of the disease, disorder or condition, previous therapy, the patient's health status and response to the drugs, and the judgment of the treating physician. In one aspect, prophylactic treatments include administering to a mammal, who previously experienced at least one symptom of the disease being treated and is currently in remission, a pharmaceutical composition comprising an inhibitor of CD30L in order to prevent a return of the symptoms of the disease or condition.

[0843] In certain embodiments wherein the patient's condition does not improve, upon the doctor's discretion the administration of therapeutic agent is administered chronically, that is, for an extended period of time, including throughout the duration of the patient's life in order to ameliorate or otherwise control or limit the symptoms of the patient's disease or condition.

[0844] In certain embodiments wherein a patient's status does improve, the dose of therapeutic agent being administered may be temporarily reduced or temporarily suspended for a certain length of time (i.e., a “drug holiday”). In specific embodiments, the length of the drug holiday is between 2 days and 1 year, including by way of example only, 2 days, 3 days, 4 days, 5 days, 6 days, 7 days, 10 days, 12 days, 15 days, 20 days, 28 days, or more than 28 days. The dose reduction during a drug holiday is, by way of example only, by 10%-100%, including by way of example only 10%, 15%, 20%, 25%, 30%, 35%, 40%, 45%, 50%, 55%, 60%, 65%, 70%, 75%, 80%, 85%, 90%, 95%, and 100%.

[0845] In certain embodiments, the dose of drug being administered may be temporarily reduced or temporarily suspended for a certain length of time (i.e., a “drug diversion”). In specific embodiments, the length of the drug diversion is between 2 days and 1 year, including by way of example only, 2 days, 3 days, 4 days, 5 days, 6 days, 7 days, 10 days, 12 days, 15 days, 20 days, 28 days, or more than 28 days. The dose reduction during a drug diversion is, by way of example only, by 10%-100%, including by way of example only 10%, 15%, 20%, 25%, 30%, 35%, 40%, 45%, 50%, 55%, 60%, 65%, 70%, 75%, 80%, 85%, 90%, 95%, and 100%. After a suitable length of time, the normal dosing schedule is optionally reinstated.

[0846] In some embodiments, once improvement of the patient's conditions has occurred, a maintenance dose is administered if necessary. Subsequently, in specific embodiments, the dosage or the frequency of administration, or both, is reduced, as a function of the symptoms, to a level at which the improved disease, disorder or condition is retained. In certain embodiments, however, the patient requires intermittent treatment on a long-term basis upon any recurrence of symptoms.

[0847] The amount of a given therapeutic agent that corresponds to such an amount varies depending upon factors such as the particular therapeutic agent, disease condition and its severity, the identity (e.g., weight, sex) of the subject in need of treatment, but can nevertheless be determined according to the particular circumstances surrounding the case, including, e.g., the specific agent being administered, the route of administration, the condition being treated, and the subject or host being treated. In general, however, doses employed for adult human treatment are typically in the range of 0.01 mg-5000 mg per day. In one aspect, doses employed for adult human treatment are from about 1 mg to about 1000 mg per day. In one embodiment, the desired dose is conveniently presented in a single dose or in divided doses administered simultaneously (or over a short period of time) or at appropriate intervals, for example as two, three, four or more sub-doses per day.

[0848] In some embodiments, as a patient is started on a regimen of a therapeutic agent, the patient is also weaned off (e.g., step-wise decrease in dose) a second treatment regimen.

[0849] In one embodiment, the daily dosages appropriate for an inhibitor of CD30L herein are from about 0.01 to about 10 mg/kg per body weight. In specific embodiments, an indicated daily dosage in a large mammal, including, but not limited to, humans, is in the range from about 0.5 mg to about 1000 mg, conveniently administered in divided doses, including, but not limited to, up to four times a day. In some embodiments, the daily dosage is administered in extended release form. In certain embodiments, suitable unit dosage forms for oral administration comprise from about 1 to 500 mg active ingredient. In some embodiments, the daily dosage or the amount of active in the dosage form are lower or higher than the ranges indicated herein, based on a number of variables in regard to an individual treatment regime. In various embodiments, the daily and unit dosages are altered depending on a number of variables including, but not limited to, the activity of the therapeutic agent used, the disease or condition to be treated, the mode of administration, the requirements of the individual subject, the severity of the disease or condition being treated, and the judgment of the practitioner.

[0850] Toxicity and therapeutic efficacy of such therapeutic regimens are determined by standard pharmaceutical procedures in cell cultures or experimental animals, including, but not limited to, the determination of the LD₅₀ and the ED₅₀. The dose ratio between the toxic and therapeutic effects is the therapeutic index and it is expressed as the ratio between LD₅₀ and ED₅₀. In certain embodiments, the data obtained from cell culture assays and animal studies are used in formulating the therapeutically effective daily dosage range and/or the therapeutically effective unit dosage amount for use in mammals, including humans. In some embodiments, the daily dosage amount of the therapeutic agent described herein lies within a range of circulating concentrations that include the ED₅₀ with minimal toxicity. In certain embodiments, the daily dosage range and/or the unit dosage amount varies within this range depending upon the dosage form employed and the route of administration utilized.

[0851] Disclosed herein are therapeutic agents formulated into pharmaceutical compositions. The pharmaceutical composition may comprise an inhibitor of anti-CD30L. The pharmaceutical composition may comprise an antibody. The pharmaceutical composition may comprise an anti-CD30L antibody.

[0852] Pharmaceutical compositions are formulated in a conventional manner using one or more pharmaceutically acceptable inactive ingredients that facilitate processing of the active therapeutic agent into preparations that can be used pharmaceutically. Proper formulation is dependent upon the route of administration chosen. A summary of pharmaceutical compositions described herein can be found, for example, in Remington: The Science and Practice of Pharmacy, Nineteenth Ed (Easton, Pa.: Mack Publishing Company, 1995); Hoover, John E., Remington's Pharmaceutical Sciences, Mack Publishing Co., Easton, Pennsylvania 1975; Liberman, H. A. and Lachman, L., Eds., Pharmaceutical Dosage Forms, Marcel Decker, New York, N.Y., 1980; and Pharmaceutical Dosage Forms and Drug Delivery Systems, Seventh Ed. (Lippincott Williams & Wilkins, 1999), herein incorporated by reference for such disclosure.

[0853] Provided herein are pharmaceutical compositions that include an inhibitor of CD30L, and at least one pharmaceutically acceptable inactive ingredient. Optionally, the compositions include other therapeutic agent as discussed herein. In some embodiments, the therapeutic agents described herein are administered as pharmaceutical compositions in which the therapeutic agents are mixed with other active ingredients, as in combination therapy. In some embodiments, the pharmaceutical compositions include other medicinal or pharmaceutical agents, carriers, adjuvants, preserving, stabilizing, wetting or emulsifying agents, solution promoters, salts for regulating the osmotic pressure, and/or buffers. In some embodiments, the pharmaceutical compositions include other therapeutically valuable substances.

[0854] A pharmaceutical composition, as used herein, refers to a mixture of a therapeutic agent, e.g., an inhibitor of CD30L, with other chemical components (i.e. pharmaceutically acceptable inactive ingredients), such as carriers, excipients, binders, filling agents, suspending agents, flavoring agents, sweetening agents, disintegrating agents, dispersing agents, surfactants, lubricants, colorants, diluents, solubilizers, moistening agents, plasticizers, stabilizers, penetration enhancers, wetting agents, anti-foaming agents, antioxidants, preservatives, or one or more combination thereof. Optionally, the compositions include two or more therapeutic agent as discussed herein. In practicing the methods of treatment or use provided herein, therapeutically effective amounts of therapeutic agents described herein are administered in a pharmaceutical composition to a mammal having a disease, disorder, or condition to be treated, e.g., an inflammatory disease, fibrostenotic disease, and/or fibrotic disease. In some embodiments, the mammal is a human. A therapeutically effective amount can vary widely depending on the severity of the disease, the age and relative health of the subject, the potency of the therapeutic agent used and other factors. The therapeutic agents can be used singly or in combination with one or more therapeutic agents as components of mixtures.

[0855] The pharmaceutical formulations described herein are administered to a subject by appropriate administration routes, including but not limited to, oral, parenteral (e.g., intravenous, subcutaneous, intramuscular), intranasal, buccal, topical, or transdermal administration routes. The pharmaceutical formulations described herein include, but are not limited to, aqueous liquid dispersions, self-emulsifying dispersions, solid solutions, liposomal dispersions, aerosols, solid dosage forms, powders, immediate release formulations, controlled release formulations, fast melt formulations, tablets, capsules, pills, delayed release formulations, extended release formulations, pulsatile release formulations, multiparticulate formulations, and mixed immediate and controlled release formulations.

[0856] Pharmaceutical compositions including a therapeutic agent, e.g., inhibitor of anti-CD30L, are manufactured in a conventional manner, such as, by way of example only, by means of conventional mixing, dissolving, granulating, dragee-making, levigating, emulsifying, encapsulating, entrapping or compression processes. Optionally, the compositions include another therapeutic agent, e.g., one as discussed herein.

[0857] The pharmaceutical compositions may include at least a therapeutic agent, e.g., inhibitor of anti-CD30L, as an active ingredient in free-acid or free-base form, or in a pharmaceutically acceptable salt form. In addition, the methods and pharmaceutical compositions described herein include the use of N-oxides (if appropriate), crystalline forms, amorphous phases, as well as active metabolites of these compounds having the same type of activity. In some embodiments, therapeutic agents exist in unsolvated form or in solvated forms with pharmaceutically acceptable solvents such as water, ethanol, and the like. The solvated forms of the therapeutic agents are also considered to be disclosed herein.

[0858] In some embodiments, a therapeutic agent exists as a tautomer. All tautomers are included within the scope of the agents presented herein. As such, it is to be understood that a therapeutic agent or a salt thereof may exhibit the phenomenon of tautomerism whereby two chemical compounds that are capable of facile interconversion by exchanging a hydrogen atom between two atoms, to either of which it forms a covalent bond. Since the tautomeric compounds exist in mobile equilibrium with each other they may be regarded as different isomeric forms of the same compound.

[0859] In some embodiments, a therapeutic agent exists as an enantiomer, diastereomer, or other stereoisomeric form. The agents disclosed herein include all enantiomeric, diastereomeric, and epimeric forms as well as mixtures thereof.

[0860] In some embodiments, therapeutic agents described herein may be prepared as prodrugs. A “prodrug” refers to an agent that is converted into the parent drug in vivo. Prodrugs are often useful because, in some situations, they may be easier to administer than the parent drug. They may, for instance, be bioavailable by oral administration whereas the parent is not. The prodrug may also have improved solubility in pharmaceutical compositions over the parent drug. An example, without limitation, of a prodrug would be a therapeutic agent described herein, which is administered as an ester (the “prodrug”) to facilitate transmittal across a cell membrane where water solubility is detrimental to mobility but which then is metabolically hydrolyzed to the carboxylic acid, the active entity, once inside the cell where water-solubility is beneficial. A further example of a prodrug might be a short peptide (polyaminoacid) bonded to an acid group where the peptide is metabolized to reveal the active moiety. In certain embodiments, upon in vivo administration, a prodrug is chemically converted to the biologically, pharmaceutically or therapeutically active form of the therapeutic agent. In certain embodiments, a prodrug is enzymatically metabolized by one or more steps or processes to the biologically, pharmaceutically or therapeutically active form of the therapeutic agent.

[0861] Prodrug forms of the therapeutic agents, wherein the prodrug is metabolized in vivo to produce an agent as set forth herein are included within the scope of the claims. Prodrug forms of the herein described therapeutic agents, wherein the prodrug is metabolized in vivo to produce an agent as set forth herein are included within the scope of the claims. In some cases, some of the therapeutic agents described herein may be a prodrug for another derivative or active compound. In some embodiments described herein, hydrazones are metabolized in vivo to produce a therapeutic agent.

[0862] In certain embodiments, compositions provided herein include one or more preservatives to inhibit microbial activity. Suitable preservatives include mercury-containing substances such as merfen and thiomersal; stabilized chlorine dioxide; and quaternary ammonium compounds such as benzalkonium chloride, cetyltrimethylammonium bromide and cetylpyridinium chloride.

[0863] In some embodiments, formulations described herein benefit from antioxidants, metal chelating agents, thiol containing compounds and other general stabilizing agents. Examples of such stabilizing agents, include, but are not limited to: (a) about 0.5% to about 2% w/v glycerol, (b) about 0.1% to about 1% w/v methionine, (c) about 0.1% to about 2% w/v monothioglycerol, (d) about 1 mM to about 10 mM EDTA, (e) about 0.01% to about 2% w/v ascorbic acid, (f) 0.003% to about 0.02% w/v polysorbate 80, (g) 0.001% to about 0.05% w/v. polysorbate 20, (h) arginine, (i) heparin, ( ) dextran sulfate, (k) cyclodextrins, (1) pentosan polysulfate and other heparinoids, (m) divalent cations such as magnesium and zinc; or (n) combinations thereof.

[0864] The pharmaceutical compositions described herein, which include a therapeutic agent such an inhibitor of CD30L are formulated into any suitable dosage form, including but not limited to, aqueous oral dispersions, liquids, gels, syrups, elixirs, slurries, suspensions, solid oral dosage forms, aerosols, controlled release formulations, fast melt formulations, effervescent formulations, lyophilized formulations, tablets, powders, pills, dragees, capsules, delayed release formulations, extended release formulations, pulsatile release formulations, multiparticulate formulations, and mixed immediate release and controlled release formulations. In one aspect, a therapeutic agent as discussed herein, e.g., an inhibitor of CD30L is formulated into a pharmaceutical composition suitable for intramuscular, subcutaneous, or intravenous injection. In one aspect, formulations suitable for intramuscular, subcutaneous, or intravenous injection include physiologically acceptable sterile aqueous or non-aqueous solutions, dispersions, suspensions or emulsions, and sterile powders for reconstitution into sterile injectable solutions or dispersions. Examples of suitable aqueous and non-aqueous carriers, diluents, solvents, or vehicles include water, ethanol, polyols (propyleneglycol, polyethylene-glycol, glycerol, cremophor and the like), suitable mixtures thereof, vegetable oils (such as olive oil) and injectable organic esters such as ethyl oleate. Proper fluidity can be maintained, for example, by the use of a coating such as lecithin, by the maintenance of the required particle size in the case of dispersions, and by the use of surfactants. In some embodiments, formulations suitable for subcutaneous injection also contain additives such as preserving, wetting, emulsifying, and dispensing agents. Prevention of the growth of microorganisms can be ensured by various antibacterial and antifungal agents, such as parabens, chlorobutanol, phenol, sorbic acid, and the like. In some cases it is desirable to include isotonic agents, such as sugars, sodium chloride, and the like. Prolonged absorption of the injectable pharmaceutical form can be brought about by the use of agents delaying absorption, such as aluminum monostearate and gelatin.

[0865] For intravenous injections or drips or infusions, a therapeutic agent described herein is formulated in aqueous solutions, preferably in physiologically compatible buffers such as Hank's solution, Ringer's solution, or physiological saline buffer. For transmucosal administration, penetrants appropriate to the barrier to be permeated are used in the formulation. Such penetrants are generally known in the art. For other parenteral injections, appropriate formulations include aqueous or nonaqueous solutions, preferably with physiologically compatible buffers or excipients. Such excipients are known.

[0866] Parenteral injections may involve bolus injection or continuous infusion. Formulations for injection may be presented in unit dosage form, e.g., in ampoules or in multi-dose containers, with an added preservative. The pharmaceutical composition described herein may be in a form suitable for parenteral injection as a sterile suspensions, solutions or emulsions in oily or aqueous vehicles, and may contain formulatory agents such as suspending, stabilizing and/or dispersing agents. In one aspect, the active ingredient is in powder form for constitution with a suitable vehicle, e.g., sterile pyrogen-free water, before use.

[0867] For administration by inhalation, a therapeutic agent is formulated for use as an aerosol, a mist or a powder. Pharmaceutical compositions described herein are conveniently delivered in the form of an aerosol spray presentation from pressurized packs or a nebuliser, with the use of a suitable propellant, e.g., dichlorodifluoromethane, trichlorofluoromethane, dichlorotetrafluoroethane, carbon dioxide or other suitable gas. In the case of a pressurized aerosol, the dosage unit may be determined by providing a valve to deliver a metered amount. Capsules and cartridges of, such as, by way of example only, gelatin for use in an inhaler or insufflator may be formulated containing a powder mix of the therapeutic agent described herein and a suitable powder base such as lactose or starch.

[0868] Representative intranasal formulations are described in, for example, U.S. Pat. Nos. 4,476,116, 5,116,817 and 6,391,452. Formulations that include a therapeutic agent are prepared as solutions in saline, employing benzyl alcohol or other suitable preservatives, fluorocarbons, and/or other solubilizing or dispersing agents known in the art. See, for example, Ansel, H. C. et al., Pharmaceutical Dosage Forms and Drug Delivery Systems, Sixth Ed. (1995). Preferably these compositions and formulations are prepared with suitable nontoxic pharmaceutically acceptable ingredients. These ingredients are known to those skilled in the preparation of nasal dosage forms and some of these can be found in REMINGTON: THE SCIENCE AND PRACTICE OF PHARMACY, 21st edition, 2005. The choice of suitable carriers is dependent upon the exact nature of the nasal dosage form desired, e.g., solutions, suspensions, ointments, or gels. Nasal dosage forms generally contain large amounts of water in addition to the active ingredient. Minor amounts of other ingredients such as pH adjusters, emulsifiers or dispersing agents, preservatives, surfactants, gelling agents, or buffering and other stabilizing and solubilizing agents are optionally present. Preferably, the nasal dosage form should be isotonic with nasal secretions.

[0869] Pharmaceutical preparations for oral use are obtained by mixing one or more solid excipient with one or more of the therapeutic agents described herein, optionally grinding the resulting mixture, and processing the mixture of granules, after adding suitable auxiliaries, if desired, to obtain tablets or dragee cores. Suitable excipients include, for example, fillers such as sugars, including lactose, sucrose, mannitol, or sorbitol; cellulose preparations such as, for example, maize starch, wheat starch, rice starch, potato starch, gelatin, gum tragacanth, methylcellulose, microcrystalline cellulose, hydroxypropylmethylcellulose, sodium carboxymethylcellulose; or others such as: polyvinylpyrrolidone (PVP or povidone) or calcium phosphate. If desired, disintegrating agents are added, such as the cross-linked croscarmellose sodium, polyvinylpyrrolidone, agar, or alginic acid or a salt thereof such as sodium alginate. In some embodiments, dyestuffs or pigments are added to the tablets or dragee coatings for identification or to characterize different combinations of active therapeutic agent doses.

[0870] In some embodiments, pharmaceutical formulations of a therapeutic agent are in the form of a capsules, including push-fit capsules made of gelatin, as well as soft, sealed capsules made of gelatin and a plasticizer, such as glycerol or sorbitol. The push-fit capsules contain the active ingredients in admixture with filler such as lactose, binders such as starches, and/or lubricants such as talc or magnesium stearate and, optionally, stabilizers. In soft capsules, the active therapeutic agent is dissolved or suspended in suitable liquids, such as fatty oils, liquid paraffin, or liquid polyethylene glycols. In some embodiments, stabilizers are added. A capsule may be prepared, for example, by placing the bulk blend of the formulation of the therapeutic agent inside of a capsule. In some embodiments, the formulations (non-aqueous suspensions and solutions) are placed in a soft gelatin capsule. In other embodiments, the formulations are placed in standard gelatin capsules or non-gelatin capsules such as capsules comprising HPMC. In other embodiments, the formulation is placed in a sprinkle capsule, wherein the capsule is swallowed whole or the capsule is opened and the contents sprinkled on food prior to eating.

[0871] All formulations for oral administration are in dosages suitable for such administration. In one aspect, solid oral dosage forms are prepared by mixing a therapeutic agent with one or more of the following: antioxidants, flavoring agents, and carrier materials such as binders, suspending agents, disintegration agents, filling agents, surfactants, solubilizers, stabilizers, lubricants, wetting agents, and diluents. In some embodiments, the solid dosage forms disclosed herein are in the form of a tablet, (including a suspension tablet, a fast-melt tablet, a bite-disintegration tablet, a rapid-disintegration tablet, an effervescent tablet, or a caplet), a pill, a powder, a capsule, solid dispersion, solid solution, bioerodible dosage form, controlled release formulations, pulsatile release dosage forms, multiparticulate dosage forms, beads, pellets, granules. In other embodiments, the pharmaceutical formulation is in the form of a powder. Compressed tablets are solid dosage forms prepared by compacting the bulk blend of the formulations described above. In various embodiments, tablets will include one or more flavoring agents. In other embodiments, the tablets will include a film surrounding the final compressed tablet. In some embodiments, the film coating can provide a delayed release of a therapeutic agent from the formulation. In other embodiments, the film coating aids in patient compliance (e.g., Opadry® coatings or sugar coating). Film coatings including Opadry® typically range from about 1% to about 3% of the tablet weight. In some embodiments, solid dosage forms, e.g., tablets, effervescent tablets, and capsules, are prepared by mixing particles of a therapeutic agent with one or more pharmaceutical excipients to form a bulk blend composition. The bulk blend is readily subdivided into equally effective unit dosage forms, such as tablets, pills, and capsules. In some embodiments, the individual unit dosages include film coatings. These formulations are manufactured by conventional formulation techniques.

[0872] In another aspect, dosage forms include microencapsulated formulations. In some embodiments, one or more other compatible materials are present in the microencapsulation material. Exemplary materials include, but are not limited to, pH modifiers, erosion facilitators, anti-foaming agents, antioxidants, flavoring agents, and carrier materials such as binders, suspending agents, disintegration agents, filling agents, surfactants, solubilizers, stabilizers, lubricants, wetting agents, and diluents. Exemplary useful microencapsulation materials include, but are not limited to, hydroxypropyl cellulose ethers (HPC) such as Klucel® or Nisso HPC, low-substituted hydroxypropyl cellulose ethers (L-HPC), hydroxypropyl methyl cellulose ethers (HPMC) such as Seppifilm-LC, Pharmacoat®, Metolose SR, Methocel®-E, Opadry YS, PrimaFlo, Benecel MP824, and Benecel MP843, methylcellulose polymers such as Methocel®-A, hydroxypropylmethylcellulose acetate stearate Aqoat (HF-LS, HF-LG,HF-MS) and Metolose®, Ethylcelluloses (EC) and mixtures thereof such as E461, Ethocel®, Aqualon®-EC, Surelease®, Polyvinyl alcohol (PVA) such as Opadry AMB, hydroxyethylcelluloses such as Natrosol®, carboxymethylcelluloses and salts of carboxymethylcelluloses (CMC) such as Aqualon®-CMC, polyvinyl alcohol and polyethylene glycol co-polymers such as Kollicoat IR®, monoglycerides (Myverol), triglycerides (KLX), polyethylene glycols, modified food starch, acrylic polymers and mixtures of acrylic polymers with cellulose ethers such as Eudragit® EPO, Eudragit® L30D-55, Eudragit®FS 30D Eudragit®L100-55, Eudragit®L100, Eudragit®S100, Eudragit®RD100, Eudragit®E100, Eudragit®L12.5, Eudragit®S12.5, Eudragit®NE30D, and Eudragit®NE 40D, cellulose acetate phthalate, sepifilms such as mixtures of HPMC and stearic acid, cyclodextrins, and mixtures of these materials.

[0873] Liquid formulation dosage forms for oral administration are optionally aqueous suspensions selected from the group including, but not limited to, pharmaceutically acceptable aqueous oral dispersions, emulsions, solutions, elixirs, gels, and syrups. See, e.g., Singh et al., Encyclopedia of Pharmaceutical Technology, 2nd Ed., pp. 754-757 (2002). In addition to therapeutic agent the liquid dosage forms optionally include additives, such as: (a) disintegrating agents; (b) dispersing agents; (c) wetting agents; (d) at least one preservative, (e) viscosity enhancing agents, (f) at least one sweetening agent, and (g) at least one flavoring agent. In some embodiments, the aqueous dispersions further includes a crystal-forming inhibitor.

[0874] In some embodiments, the pharmaceutical formulations described herein are self-emulsifying drug delivery systems (SEDDS). Emulsions are dispersions of one immiscible phase in another, usually in the form of droplets. Generally, emulsions are created by vigorous mechanical dispersion. SEDDS, as opposed to emulsions or microemulsions, spontaneously form emulsions when added to an excess of water without any external mechanical dispersion or agitation. An advantage of SEDDS is that only gentle mixing is required to distribute the droplets throughout the solution. Additionally, water or the aqueous phase is optionally added just prior to administration, which ensures stability of an unstable or hydrophobic active ingredient. Thus, the SEDDS provides an effective delivery system for oral and parenteral delivery of hydrophobic active ingredients. In some embodiments, SEDDS provides improvements in the bioavailability of hydrophobic active ingredients. Methods of producing self-emulsifying dosage forms include, but are not limited to, for example, U.S. Pat. Nos. 5,858,401, 6,667,048, and 6,960,563.

[0875] Buccal formulations that include a therapeutic agent are administered using a variety of formulations known in the art. For example, such formulations include, but are not limited to, U.S. Pat. Nos. 4,229,447, 4,596,795, 4,755,386, and 5,739,136. In addition, the buccal dosage forms described herein can further include a bioerodible (hydrolysable) polymeric carrier that also serves to adhere the dosage form to the buccal mucosa. For buccal or sublingual administration, the compositions may take the form of tablets, lozenges, or gels formulated in a conventional manner.

[0876] For intravenous injections, a therapeutic agent is optionally formulated in aqueous solutions, preferably in physiologically compatible buffers such as Hank's solution, Ringer's solution, or physiological saline buffer. For transmucosal administration, penetrants appropriate to the barrier to be permeated are used in the formulation. For other parenteral injections, appropriate formulations include aqueous or nonaqueous solutions, preferably with physiologically compatible buffers or excipients.

[0877] Parenteral injections optionally involve bolus injection or continuous infusion. Formulations for injection are optionally presented in unit dosage form, e.g., in ampoules or in multi dose containers, with an added preservative. In some embodiments, a pharmaceutical composition described herein is in a form suitable for parenteral injection as a sterile suspensions, solutions or emulsions in oily or aqueous vehicles, and contain formulatory agents such as suspending, stabilizing and/or dispersing agents. Pharmaceutical formulations for parenteral administration include aqueous solutions of an agent that modulates the activity of a carotid body in water soluble form. Additionally, suspensions of an agent that modulates the activity of a carotid body are optionally prepared as appropriate, e.g., oily injection suspensions.

[0878] Conventional formulation techniques include, e.g., one or a combination of methods: (1) dry mixing, (2) direct compression, (3) milling, (4) dry or non-aqueous granulation, (5) wet granulation, or (6) fusion. Other methods include, e.g., spray drying, pan coating, melt granulation, granulation, fluidized bed spray drying or coating (e.g., wurster coating), tangential coating, top spraying, tableting, extruding and the like.

[0879] Suitable carriers for use in the solid dosage forms described herein include, but are not limited to, acacia, gelatin, colloidal silicon dioxide, calcium glycerophosphate, calcium lactate, maltodextrin, glycerine, magnesium silicate, sodium caseinate, soy lecithin, sodium chloride, tricalcium phosphate, dipotassium phosphate, sodium stearoyl lactylate, carrageenan, monoglyceride, diglyceride, pregelatinized starch, hydroxypropylmethylcellulose, hydroxypropylmethylcellulose acetate stearate, sucrose, microcrystalline cellulose, lactose, mannitol and the like.

[0880] Suitable filling agents for use in the solid dosage forms described herein include, but are not limited to, lactose, calcium carbonate, calcium phosphate, dibasic calcium phosphate, calcium sulfate, microcrystalline cellulose, cellulose powder, dextrose, dextrates, dextran, starches, pregelatinized starch, hydroxypropylmethycellulose (HPMC), hydroxypropylmethycellulose phthalate, hydroxypropylmethylcellulose acetate stearate (HPMCAS), sucrose, xylitol, lactitol, mannitol, sorbitol, sodium chloride, polyethylene glycol, and the like.

[0881] Suitable disintegrants for use in the solid dosage forms described herein include, but are not limited to, natural starch such as corn starch or potato starch, a pregelatinized starch, or sodium starch glycolate, a cellulose such as methylcrystalline cellulose, methylcellulose, microcrystalline cellulose, croscarmellose, or a cross-linked cellulose, such as cross-linked sodium carboxymethylcellulose, cross-linked carboxymethylcellulose, or cross-linked croscarmellose, a cross-linked starch such as sodium starch glycolate, a cross-linked polymer such as crospovidone, a cross-linked polyvinylpyrrolidone, alginate such as alginic acid or a salt of alginic acid such as sodium alginate, a gum such as agar, guar, locust bean, Karaya, pectin, or tragacanth, sodium starch glycolate, bentonite, sodium lauryl sulfate, sodium lauryl sulfate in combination starch, and the like.

[0882] Binders impart cohesiveness to solid oral dosage form formulations: for powder filled capsule formulation, they aid in plug formation that can be filled into soft or hard shell capsules and for tablet formulation, they ensure the tablet remaining intact after compression and help assure blend uniformity prior to a compression or fill step. Materials suitable for use as binders in the solid dosage forms described herein include, but are not limited to, carboxymethylcellulose, methylcellulose, hydroxypropylmethylcellulose, hydroxypropylmethylcellulose acetate stearate, hydroxyethylcellulose, hydroxypropylcellulose, ethylcellulose, and microcrystalline cellulose, microcrystalline dextrose, amylose, magnesium aluminum silicate, polysaccharide acids, bentonites, gelatin, polyvinylpyrrolidone/vinyl acetate copolymer, crospovidone, povidone, starch, pregelatinized starch, tragacanth, dextrin, a sugar, such as sucrose, glucose, dextrose, molasses, mannitol, sorbitol, xylitol, lactose, a natural or synthetic gum such as acacia, tragacanth, ghatti gum, mucilage of isapol husks, starch, polyvinylpyrrolidone, larch arabogalactan, polyethylene glycol, waxes, sodium alginate, and the like.

[0883] In general, binder levels of 20-70% are used in powder-filled gelatin capsule formulations. Binder usage level in tablet formulations varies whether direct compression, wet granulation, roller compaction, or usage of other excipients such as fillers which itself can act as moderate binder. Binder levels of up to 70% in tablet formulations is common.

[0884] Suitable lubricants or glidants for use in the solid dosage forms described herein include, but are not limited to, stearic acid, calcium hydroxide, talc, corn starch, sodium stearyl fumerate, alkali-metal and alkaline earth metal salts, such as aluminum, calcium, magnesium, zinc, stearic acid, sodium stearates, magnesium stearate, zinc stearate, waxes, Stearowet®, boric acid, sodium benzoate, sodium acetate, sodium chloride, leucine, a polyethylene glycol or a methoxypolyethylene glycol such as Carbowax™, PEG 4000, PEG 5000, PEG 6000, propylene glycol, sodium oleate, glyceryl behenate, glyceryl palmitostearate, glyceryl benzoate, magnesium or sodium lauryl sulfate, and the like.

[0885] Suitable diluents for use in the solid dosage forms described herein include, but are not limited to, sugars (including lactose, sucrose, and dextrose), polysaccharides (including dextrates and maltodextrin), polyols (including mannitol, xylitol, and sorbitol), cyclodextrins and the like.

[0886] Suitable wetting agents for use in the solid dosage forms described herein include, for example, oleic acid, glyceryl monostearate, sorbitan monooleate, sorbitan monolaurate, triethanolamine oleate, polyoxyethylene sorbitan monooleate, polyoxyethylene sorbitan monolaurate, quaternary ammonium compounds (e.g., Polyquat 10®), sodium oleate, sodium lauryl sulfate, magnesium stearate, sodium docusate, triacetin, vitamin E TPGS and the like.

[0887] Suitable surfactants for use in the solid dosage forms described herein include, for example, sodium lauryl sulfate, sorbitan monooleate, polyoxyethylene sorbitan monooleate, polysorbates, polaxomers, bile salts, glyceryl monostearate, copolymers of ethylene oxide and propylene oxide, e.g., Pluronic® (BASF), and the like.

[0888] Suitable suspending agents for use in the solid dosage forms described here include, but are not limited to, polyvinylpyrrolidone, e.g., polyvinylpyrrolidone K12, polyvinylpyrrolidone K17, polyvinylpyrrolidone K25, or polyvinylpyrrolidone K30, polyethylene glycol, e.g., the polyethylene glycol can have a molecular weight of about 300 to about 6000, or about 3350 to about 4000, or about 7000 to about 5400, vinyl pyrrolidone/vinyl acetate copolymer (S630), sodium carboxymethylcellulose, methylcellulose, hydroxy-propylmethylcellulose, polysorbate-80, hydroxyethylcellulose, sodium alginate, gums, such as, e.g., gum tragacanth and gum acacia, guar gum, xanthans, including xanthan gum, sugars, cellulosics, such as, e.g., sodium carboxymethylcellulose, methylcellulose, sodium carboxymethylcellulose, hydroxypropylmethylcellulose, hydroxyethylcellulose, polysorbate-80, sodium alginate, polyethoxylated sorbitan monolaurate, polyethoxylated sorbitan monolaurate, povidone and the like.

[0889] Suitable antioxidants for use in the solid dosage forms described herein include, for example, e.g., butylated hydroxytoluene (BHT), sodium ascorbate, and tocopherol.

[0890] It should be appreciated that there is considerable overlap between additives used in the solid dosage forms described herein. Thus, the above-listed additives should be taken as merely exemplary, and not limiting, of the types of additives that can be included in solid dosage forms of the pharmaceutical compositions described herein. The amounts of such additives can be readily determined by one skilled in the art, according to the particular properties desired.

[0891] In various embodiments, the particles of a therapeutic agents and one or more excipients are dry blended and compressed into a mass, such as a tablet, having a hardness sufficient to provide a pharmaceutical composition that substantially disintegrates within less than about 30 minutes, less than about 35 minutes, less than about 40 minutes, less than about 45 minutes, less than about 50 minutes, less than about 55 minutes, or less than about 60 minutes, after oral administration, thereby releasing the formulation into the gastrointestinal fluid.

[0892] In other embodiments, a powder including a therapeutic agent is formulated to include one or more pharmaceutical excipients and flavors. Such a powder is prepared, for example, by mixing the therapeutic agent and optional pharmaceutical excipients to form a bulk blend composition. Additional embodiments also include a suspending agent and/or a wetting agent. This bulk blend is uniformly subdivided into unit dosage packaging or multi-dosage packaging units.

[0893] In still other embodiments, effervescent powders are also prepared. Effervescent salts have been used to disperse medicines in water for oral administration.

[0894] In some embodiments, the pharmaceutical dosage forms are formulated to provide a controlled release of a therapeutic agent. Controlled release refers to the release of the therapeutic agent from a dosage form in which it is incorporated according to a desired profile over an extended period of time. Controlled release profiles include, for example, sustained release, prolonged release, pulsatile release, and delayed release profiles. In contrast to immediate release compositions, controlled release compositions allow delivery of an agent to a subject over an extended period of time according to a predetermined profile. Such release rates can provide therapeutically effective levels of agent for an extended period of time and thereby provide a longer period of pharmacologic response while minimizing side effects as compared to conventional rapid release dosage forms. Such longer periods of response provide for many inherent benefits that are not achieved with the corresponding short acting, immediate release preparations.

[0895] In some embodiments, the solid dosage forms described herein are formulated as enteric coated delayed release oral dosage forms, i.e., as an oral dosage form of a pharmaceutical composition as described herein which utilizes an enteric coating to affect release in the small intestine or large intestine. In one aspect, the enteric coated dosage form is a compressed or molded or extruded tablet/mold (coated or uncoated) containing granules, powder, pellets, beads or particles of the active ingredient and/or other composition components, which are themselves coated or uncoated. In one aspect, the enteric coated oral dosage form is in the form of a capsule containing pellets, beads or granules, which include a therapeutic agent that are coated or uncoated.

[0896] Any coatings should be applied to a sufficient thickness such that the entire coating does not dissolve in the gastrointestinal fluids at pH below about 5, but does dissolve at pH about 5 and above. Coatings are typically selected from any of the following: Shellac—this coating dissolves in media of pH >7; Acrylic polymers—examples of suitable acrylic polymers include methacrylic acid copolymers and ammonium methacrylate copolymers. The Eudragit series E, L, S, RL, RS and NE (Rohm Pharma) are available as solubilized in organic solvent, aqueous dispersion, or dry powders. The Eudragit series RL, NE, and RS are insoluble in the gastrointestinal tract but are permeable and are used primarily for colonic targeting. The Eudragit series E dissolve in the stomach. The Eudragit series L, L-30D and S are insoluble in stomach and dissolve in the intestine; Poly Vinyl Acetate Phthalate (PVAP)-PVAP dissolves in pH >5, and it is much less permeable to water vapor and gastric fluids. Conventional coating techniques such as spray or pan coating are employed to apply coatings. The coating thickness must be sufficient to ensure that the oral dosage form remains intact until the desired site of topical delivery in the intestinal tract is reached.

[0897] In other embodiments, the formulations described herein are delivered using a pulsatile dosage form. A pulsatile dosage form is capable of providing one or more immediate release pulses at predetermined time points after a controlled lag time or at specific sites. Exemplary pulsatile dosage forms and methods of their manufacture are disclosed in U.S. Pat. Nos. 5,011,692, 5,017,381, 5,229,135, 5,840,329 and 5,837,284. In one embodiment, the pulsatile dosage form includes at least two groups of particles, (i.e. multiparticulate) each containing the formulation described herein. The first group of particles provides a substantially immediate dose of a therapeutic agent upon ingestion by a mammal. The first group of particles can be either uncoated or include a coating and/or sealant. In one aspect, the second group of particles comprises coated particles. The coating on the second group of particles provides a delay of from about 2 hours to about 7 hours following ingestion before release of the second dose. Suitable coatings for pharmaceutical compositions are described herein or known in the art.

[0898] In some embodiments, pharmaceutical formulations are provided that include particles of a therapeutic agent and at least one dispersing agent or suspending agent for oral administration to a subject. The formulations may be a powder and/or granules for suspension, and upon admixture with water, a substantially uniform suspension is obtained.

[0899] In some embodiments, particles formulated for controlled release are incorporated in a gel or a patch or a wound dressing.

[0900] In one aspect, liquid formulation dosage forms for oral administration and/or for topical administration as a wash are in the form of aqueous suspensions selected from the group including, but not limited to, pharmaceutically acceptable aqueous oral dispersions, emulsions, solutions, elixirs, gels, and syrups. See, e.g., Singh et al., Encyclopedia of Pharmaceutical Technology, 2nd Ed., pp. 754-757 (2002). In addition to the particles of a therapeutic agent, the liquid dosage forms include additives, such as: (a) disintegrating agents; (b) dispersing agents; (c) wetting agents; (d) at least one preservative, (e) viscosity enhancing agents, (f) at least one sweetening agent, and (g) at least one flavoring agent. In some embodiments, the aqueous dispersions can further include a crystalline inhibitor.

[0901] In some embodiments, the liquid formulations also include inert diluents commonly used in the art, such as water or other solvents, solubilizing agents, and emulsifiers. Exemplary emulsifiers are ethyl alcohol, isopropyl alcohol, ethyl carbonate, ethyl acetate, benzyl alcohol, benzyl benzoate, propyleneglycol, 1,3-butyleneglycol, dimethylformamide, sodium lauryl sulfate, sodium doccusate, cholesterol, cholesterol esters, taurocholic acid, phosphotidylcholine, oils, such as cottonseed oil, groundnut oil, corn germ oil, olive oil, castor oil, and sesame oil, glycerol, tetrahydrofurfuryl alcohol, polyethylene glycols, fatty acid esters of sorbitan, or mixtures of these substances, and the like.

[0902] Furthermore, pharmaceutical compositions optionally include one or more pH adjusting agents or buffering agents, including acids such as acetic, boric, citric, lactic, phosphoric and hydrochloric acids; bases such as sodium hydroxide, sodium phosphate, sodium borate, sodium citrate, sodium acetate, sodium lactate and tris-hydroxymethylaminomethane; and buffers such as citrate/dextrose, sodium bicarbonate and ammonium chloride. Such acids, bases and buffers are included in an amount required to maintain pH of the composition in an acceptable range.

[0903] Additionally, pharmaceutical compositions optionally include one or more salts in an amount required to bring osmolality of the composition into an acceptable range. Such salts include those having sodium, potassium or ammonium cations and chloride, citrate, ascorbate, borate, phosphate, bicarbonate, sulfate, thiosulfate or bisulfite anions; suitable salts include sodium chloride, potassium chloride, sodium thiosulfate, sodium bisulfite and ammonium sulfate.

[0904] Other pharmaceutical compositions optionally include one or more preservatives to inhibit microbial activity. Suitable preservatives include mercury-containing substances such as merfen and thiomersal; stabilized chlorine dioxide; and quaternary ammonium compounds such as benzalkonium chloride, cetyltrimethylammonium bromide and cetylpyridinium chloride.

[0905] In one embodiment, the aqueous suspensions and dispersions described herein remain in a homogenous state, as defined in The USP Pharmacists' Pharmacopeia (2005 edition, chapter 905), for at least 4 hours. In one embodiment, an aqueous suspension is re-suspended into a homogenous suspension by physical agitation lasting less than 1 minute. In still another embodiment, no agitation is necessary to maintain a homogeneous aqueous dispersion.

[0906] Examples of disintegrating agents for use in the aqueous suspensions and dispersions include, but are not limited to, a starch, e.g., a natural starch such as corn starch or potato starch, a pregelatinized starch, or sodium starch glycolate; a cellulose such as methylcrystalline cellulose, methylcellulose, croscarmellose, or a cross-linked cellulose, such as cross-linked sodium carboxymethylcellulose, cross-linked carboxymethylcellulose, or cross-linked croscarmellose; a cross-linked starch such as sodium starch glycolate; a cross-linked polymer such as crospovidone; a cross-linked polyvinylpyrrolidone; alginate such as alginic acid or a salt of alginic acid such as sodium alginate; a gum such as agar, guar, locust bean, Karaya, pectin, or tragacanth; sodium starch glycolate; bentonite; a natural sponge; a surfactant; a resin such as a cation-exchange resin; citrus pulp; sodium lauryl sulfate; sodium lauryl sulfate in combination starch; and the like.

[0907] In some embodiments, the dispersing agents suitable for the aqueous suspensions and dispersions described herein include, for example, hydrophilic polymers, electrolytes, Tween® 60 or 80, PEG, polyvinylpyrrolidone, and the carbohydrate-based dispersing agents such as, for example, hydroxypropylcellulose and hydroxypropyl cellulose ethers, hydroxypropyl methylcellulose and hydroxypropyl methylcellulose ethers, carboxymethylcellulose sodium, methylcellulose, hydroxyethylcellulose, hydroxypropylmethyl-cellulose phthalate, hydroxypropylmethyl-cellulose acetate stearate, noncrystalline cellulose, magnesium aluminum silicate, triethanolamine, polyvinyl alcohol (PVA), polyvinylpyrrolidone/vinyl acetate copolymer, 4-(1,1,3,3-tetramethylbutyl)-phenol polymer with ethylene oxide and formaldehyde (also known as tyloxapol), poloxamers; and poloxamines. In other embodiments, the dispersing agent is selected from a group not comprising one of the following agents: hydrophilic polymers; electrolytes; Tween® 60 or 80; PEG; polyvinylpyrrolidone (PVP); hydroxypropylcellulose and hydroxypropyl cellulose ethers; hydroxypropyl methylcellulose and hydroxypropyl methylcellulose ethers; carboxymethylcellulose sodium; methylcellulose; hydroxyethylcellulose; hydroxypropylmethyl-cellulose phthalate; hydroxypropylmethyl-cellulose acetate stearate; non-crystalline cellulose; magnesium aluminum silicate; triethanolamine; polyvinyl alcohol (PVA); 4-(1,1,3,3-tetramethylbutyl)-phenol polymer with ethylene oxide and formaldehyde; poloxamers; or poloxamines.

[0908] Wetting agents suitable for the aqueous suspensions and dispersions described herein include, but are not limited to, cetyl alcohol, glycerol monostearate, polyoxyethylene sorbitan fatty acid esters (e.g., the commercially available Tweens® such as e.g., Tween 20® and Tween 80®, and polyethylene glycols, oleic acid, glyceryl monostearate, sorbitan monooleate, sorbitan monolaurate, triethanolamine oleate, polyoxyethylene sorbitan monooleate, polyoxyethylene sorbitan monolaurate, sodium oleate, sodium lauryl sulfate, sodium docusate, triacetin, vitamin E TPGS, sodium taurocholate, simethicone, phosphotidylcholine and the like.

[0909] Suitable preservatives for the aqueous suspensions or dispersions described herein include, for example, potassium sorbate, parabens (e.g., methylparaben and propylparaben), benzoic acid and its salts, other esters of parahydroxybenzoic acid such as butylparaben, alcohols such as ethyl alcohol or benzyl alcohol, phenolic compounds such as phenol, or quaternary compounds such as benzalkonium chloride. Preservatives, as used herein, are incorporated into the dosage form at a concentration sufficient to inhibit microbial growth.

[0910] Suitable viscosity enhancing agents for the aqueous suspensions or dispersions described herein include, but are not limited to, methyl cellulose, xanthan gum, carboxymethyl cellulose, hydroxypropyl cellulose, hydroxypropylmethyl cellulose, Plasdon® S-630, carbomer, polyvinyl alcohol, alginates, acacia, chitosans and combinations thereof. The concentration of the viscosity enhancing agent will depend upon the agent selected and the viscosity desired.

[0911] Examples of sweetening agents suitable for the aqueous suspensions or dispersions described herein include, for example, acacia syrup, acesulfame K, alitame, aspartame, chocolate, cinnamon, citrus, cocoa, cyclamate, dextrose, fructose, ginger, glycyrrhetinate, glycyrrhiza (licorice) syrup, monoammonium glyrrhizinate (MagnaSweet©), malitol, mannitol, menthol, neohesperidine DC, neotame, Prosweet® Powder, saccharin, sorbitol, stevia, sucralose, sucrose, sodium saccharin, saccharin, aspartame, acesulfame potassium, mannitol, sucralose, tagatose, thaumatin, vanilla, xylitol, or any combination thereof.

[0912] In some embodiments, a therapeutic agent is prepared as transdermal dosage form. In some embodiments, the transdermal formulations described herein include at least three components: (1) a therapeutic agent; (2) a penetration enhancer; and (3) an optional aqueous adjuvant. In some embodiments the transdermal formulations include additional components such as, but not limited to, gelling agents, creams and ointment bases, and the like. In some embodiments, the transdermal formulation is presented as a patch or a wound dressing. In some embodiments, the transdermal formulation further include a woven or non-woven backing material to enhance absorption and prevent the removal of the transdermal formulation from the skin. In other embodiments, the transdermal formulations described herein can maintain a saturated or supersaturated state to promote diffusion into the skin.

[0913] In one aspect, formulations suitable for transdermal administration of a therapeutic agent described herein employ transdermal delivery devices and transdermal delivery patches and can be lipophilic emulsions or buffered, aqueous solutions, dissolved and/or dispersed in a polymer or an adhesive. In one aspect, such patches are constructed for continuous, pulsatile, or on demand delivery of pharmaceutical agents. Still further, transdermal delivery of the therapeutic agents described herein can be accomplished by means of iontophoretic patches and the like. In one aspect, transdermal patches provide controlled delivery of a therapeutic agent. In one aspect, transdermal devices are in the form of a bandage comprising a backing member, a reservoir containing the therapeutic agent optionally with carriers, optionally a rate controlling barrier to deliver the therapeutic agent to the skin of the host at a controlled and predetermined rate over a prolonged period of time, and means to secure the device to the skin.

[0914] In further embodiments, topical formulations include gel formulations (e.g., gel patches which adhere to the skin). In some of such embodiments, a gel composition includes any polymer that forms a gel upon contact with the body (e.g., gel formulations comprising hyaluronic acid, pluronic polymers, poly(lactic-co-glycolic acid (PLGA)-based polymers or the like). In some forms of the compositions, the formulation comprises a low-melting wax such as, but not limited to, a mixture of fatty acid glycerides, optionally in combination with cocoa butter which is first melted. Optionally, the formulations further comprise a moisturizing agent.

[0915] In certain embodiments, delivery systems for pharmaceutical therapeutic agents may be employed, such as, for example, liposomes and emulsions. In certain embodiments, compositions provided herein can also include an mucoadhesive polymer, selected from among, for example, carboxymethylcellulose, carbomer (acrylic acid polymer), poly(methylmethacrylate), polyacrylamide, polycarbophil, acrylic acid/butyl acrylate copolymer, sodium alginate and dextran.

[0916] In some embodiments, a therapeutic agent described herein may be administered topically and can be formulated into a variety of topically administrable compositions, such as solutions, suspensions, lotions, gels, pastes, medicated sticks, balms, creams or ointments. Such pharmaceutical therapeutic agents can contain solubilizers, stabilizers, tonicity enhancing agents, buffers and preservatives.

### Methods of Monitoring Treatment

[0917] In certain embodiments, described herein are methods for evaluating an effect of a treatment described herein. In some instances, the treatment comprises administration with an inhibitor of CD30L and optionally, one or more additional therapeutic agents. In some instances, the treatment is monitored by evaluating the quantity of CD30 in the subject prior to and/or after administration of a therapeutic agent, such as an inhibitor of CD30L.

[0918] Disclosed herein, in some embodiments, are the following:
[0919] 1. A method of inhibiting or reducing CD30 ligand activity or expression in a subject having or suspected of having at least one of an inflammatory disease, fibrostenotic disease, and fibrotic disease, the method comprising:
   [0920] a) identifying the subject as being a carrier of an “A” allele at nucleobase 501 within rs911605 (SEQ ID NO: 1), or a polymorphism in linkage disequilibrium therewith; and
   [0921] b) administering to the subject a therapeutically effective amount of an anti-CD30 ligand antibody, thereby inhibiting or reducing CD30 ligand activity or expression in the subject.
[0922] 2. The method of embodiment 1, provided that the inflammatory disease comprises Crohn's disease.
[0923] 3. The method of embodiment 2, provided that the Crohn's disease comprises chronic obstructive Crohn's disease.
[0924] 4. The method of embodiment 1, provided that the fibrotic disease comprises a disease of the liver.
[0925] 5. The method of embodiment 4, provided that the fibrotic disease is primary sclerosing cholangitis.
[0926] 6. The method of any of embodiments 1-5, wherein identifying the subject as being a carrier of an “A” allele at nucleobase 501 within rs911605 (SEQ ID NO: 1) of step (a) comprising:
   [0927] a) contacting a sample comprising genetic material from the subject with a nucleic acid sequence capable of hybridizing to at least 10 contiguous nucleobases between nucleobase 400 and nucleobase 600 of SEQ ID NO: 1 under standard hybridization conditions, wherein the at least 10 contiguous nucleobases comprises nucleobase at position 501; and
   [0928] b) detecting binding between the nucleic acid sequence and the at least 10 contiguous nucleobases between nucleobase 400 and nucleobase 600 of SEQ ID NO: 1.
[0929] 7. The method of embodiment 6, provided that the standard hybridization conditions comprise an annealing temperature between about 35° C. and about 65° C.
[0930] 8. The method of embodiment 6 or embodiment 7, provided that the standard hybridization conditions are performed with a TaqMan master mix solution.
[0931] 9. The method of any of embodiments 6-8, provided that the nucleic acid sequence is conjugated to a detectable molecule.
[0932] 10. The method of embodiment 9, provided that the detectable molecule comprises a fluorophore.
[0933] 11. The method of any of embodiments 6-10, provided that the nucleic acid sequence is conjugated to a quencher.
[0934] 12. The method of any of embodiments 6-11, provided that the sample comprising genetic material from the subject is amplified genetic material obtained from a nucleic acid amplification assay.
[0935] 13. The method of embodiment 12, provided that the nucleic acid amplification assay comprises amplification of DNA from the subject with a pair of primers capable of amplifying at least 15 contiguous nucleobases within rs911605, wherein one of the nucleobases within rs911605 is at position 501.
[0936] 14. The method of embodiment 12, provided that the nucleic acid amplification assay comprises amplification of DNA from the subject with a primer pair comprising SEQ ID NOS: 9-10.
[0937] 15. The method of any of embodiments 1-14, provided that the subject has been determined to be a carrier of the “A” allele by a process comprising DNA sequencing.
[0938] 16. The method of any of embodiments 1-15, provided that the subject further comprises soluble CD30 at a level greater than a control level derived from a non-diseased individual or population of non-diseased individuals.
[0939] 17. The method of any of embodiments 1-16, provided that the subject is homozygous for the “A” allele.
[0940] 18. The method of any of embodiments 1-17, provided that the subject is a carrier of a “G” allele at nucleobase 501 within rs1006026 (SEQ ID NO: 3).
[0941] 19. The method of embodiment 18, provided that the subject is homozygous for the “G” allele.
[0942] 20. The method of any of embodiments 1-19, provided that the subject has a genotype comprising at least one SEQ ID NO: 7 and SEQ ID NO: 8.
[0943] 21. A method of inhibiting or reducing CD30 ligand activity or expression in a subject having or suspected of having at least one of an inflammatory disease, a fibrostenotic disease, and a fibrotic disease, the method comprising:
   [0944] a) identifying the subject as having a genotype comprising at least one of SEQ ID NO: 5, SEQ ID NO: 6, and a polymorphism in linkage disequilibrium therewith; and
   [0945] b) administering to the subject a therapeutically effective amount of an anti-CD30 ligand antibody, thereby inhibiting or reducing CD30 ligand activity or expression in the subject.
[0946] 22. The method of embodiment 21, provided that the inflammatory disease comprises Crohn's disease.
[0947] 23. The method of embodiment 22, provided that the Crohn's disease comprises chronic obstructive Crohn's disease.
[0948] 24. The method of embodiment 21, provided that the fibrotic disease comprises a disease of the liver.
[0949] 25. The method of embodiment 24, provided that the fibrotic disease is primary sclerosing cholangitis.
[0950] 26. The method of any of embodiments 21-25, wherein identifying the subject as having the genotype comprising at least one of SEQ ID NO: 5 and SEQ ID NO: 6 comprises:
   [0951] a) contacting a sample comprising genetic material from the subject with a nucleic acid sequence capable of hybridizing to at least one of SEQ ID NO: 5 and SEQ ID NO: 6, respectively, under standard hybridization conditions; and
   [0952] b) detecting binding between the nucleic acid sequence and the at least one of SEQ ID NO: 5 and SEQ ID NO.
[0953] 27. The method of embodiment 26, provided that the standard hybridization conditions comprise an annealing temperature between about 35° C. and about 65° C.
[0954] 28. The method of embodiment 26 or embodiment 27, provided that the standard hybridization conditions are performed with a Taqman master mix solution.
[0955] 29. The method of any of embodiments 26-28, provided that the nucleic acid sequence is conjugated to a detectable molecule.
[0956] 30. The method of embodiment 29, provided that the detectable molecule comprises a fluorophore.
[0957] 31. The method of any of embodiments 26-30, provided that the nucleic acid sequence is conjugated to a quencher.
[0958] 32. The method of any of embodiments 26-31, provided that the sample comprising genetic material from the subject is amplified genetic material obtained from a nucleic acid amplification assay.
[0959] 33. The method of embodiment 32, provided that the nucleic acid amplification assay comprises amplification of DNA from the subject with a pair of primers capable of amplifying at least 15 nucleobases within rs911605, wherein the at least 15 nucleobases comprises SEQ ID NO: 5 and/or SEQ ID NO: 6.
[0960] 34. The method of embodiment 32, provided that the nucleic acid amplification assay comprises amplification of DNA from the subject with a primer pair comprising SEQ ID NOS: 9-10.
[0961] 35. The method of any of embodiments 21-25, provided that the subject has been determined to have the genotype comprising SEQ ID NO: 5 and/or SEQ ID NO: 6 by DNA sequencing.
[0962] 36. The method of any of embodiments 21-35, provided that the subject further comprises soluble CD30.
[0963] 37. The method of any of embodiments 21-36, provided that the subject is a carrier of a “G” allele at nucleobase 501 within rs1006026 (SEQ ID NO: 3).
[0964] 38. The method of embodiment 37, provided that the subject is homozygous for the “G” allele.
[0965] 39. The method of any of embodiments 21-36, provided that the subject has a genotype comprising at least one of SEQ ID NO: 7 and SEQ ID NO: 8.
[0966] 40. A method of characterizing an inflammatory disease, fibrostenotic disease and/or fibrotic disease of a subject, the method comprising: assaying genetic material from the subject to identify the presence or absence of an “A” allele at nucleobase 501 within rs911605.
[0967] 41. The method of embodiment 40, further comprising assigning a more favorable prognosis to treatment with an inhibitor of anti-CD30 ligand activity or expression when the “A” allele is present.
[0968] 42. The method of embodiment 40, further comprising assigning a less favorable prognosis to treatment with an inhibitor of anti-CD30 ligand activity or expression when the “A” allele is absent.
[0969] 43. The method of embodiment 40, further comprising assigning the subject to treatment with an inhibitor of anti-CD30 ligand activity or expression when the “A” allele is present.
[0970] 44. The method of embodiment 40, further comprising prescribing to the subject an inhibitor of anti-CD30 ligand activity or expression when the “A” allele is present.
[0971] 45. The method of embodiment 40, further comprising administering to the subject an inhibitor of anti-CD30 ligand activity or expression when the “A” allele is present.
[0972] 46. The method of any of embodiments 41-45, provided that the inhibitor of anti-CD30 ligand activity or expression is an anti-CD30 ligand antibody or antigen-binding fragment thereof.
[0973] 47. The method of any of embodiments 40-46, provided that assaying comprises amplifying from the genetic material at least 15 nucleobases within rs911605, wherein one of the nucleobases is at position 501 within rs911605.
[0974] 48. The method of any of embodiments 40-47, provided that assaying comprises performing a nucleic acid amplification assay comprising contacting the genetic material with a primer pair comprising SEQ ID NOS: 9-10.
[0975] 49. The method of any of embodiments 40-48, provided that assaying comprises hybridizing to the genetic material a nucleic acid comprising SEQ ID NO: 5 and/or SEQ ID NO: 6.
[0976] 50. The method of embodiment 49, provided that the nucleic acid sequence is conjugated to a detectable molecule.
[0977] 51. The method of embodiment 50, provided that the detectable molecule comprises a fluorophore.
[0978] 52. The method of any of embodiments 49-51, provided that the nucleic acid sequence is conjugated to a quencher.
[0979] 53. The method of any of embodiments 40-52, provided that assaying comprises DNA sequencing.
[0980] 54. The method of any of embodiments 40-53, further comprising measuring the level of CD30 in the subject.
[0981] 55. The method of any of embodiments 40-54, provided that the assaying identifies the presence or absence of a homozygous genotype for the “A” allele at nucleobase 501 within rs911605.
[0982] 56. The method of any of embodiments 40-55, further comprising assaying the genetic material from the subject to identify the presence of absence of a “G” allele at nucleobase 501 within rs1006026 (SEQ ID NO: 3).
[0983] 57. The method of embodiment 56, provided that the assaying identifies the presence or absence of a homozygous genotype for the “G” allele at nucleobase 501 within rs1006026.
[0984] 58. The method of any of embodiments 40-57, further comprising assaying the genetic material from the subject to identify the presence of absence of SEQ ID NO: 7 and/or SEQ ID NO: 8.
[0985] 59. The method of any of embodiments 40-58, provided that inflammatory disease comprises Crohn's disease.
[0986] 60. The method of embodiment 59, provided that the Crohn's disease comprises chronic obstructive Crohn's disease.
[0987] 61. The method of any of embodiments 40-58, provided that the fibrotic disease comprises a disease of the liver.
[0988] 62. The method of embodiment 61, provided that the fibrotic disease is primary sclerosing cholangitis.
[0989] 63. A method comprising treating the subject of any of embodiments 40-62 with an inhibitor of CD30 ligand activity or expression, provided that the subject comprises the “A” allele at nucleobase 501 within rs911605.
[0990] 64. The method of embodiment 63, provided that the inhibitor of CD30 ligand activity comprises an anti-CD30 ligand antibody or antigen binding fragment thereof.
[0991] 65. A method of characterizing at least one of an inflammatory disease, a fibrostenotic disease, and a fibrotic disease of a subject, the method comprising assaying genetic material from the subject to identify the presence or absence of a genotype comprising at least one of SEQ ID NO: 5 and SEQ ID NO: 6.
[0992] 66. The method of embodiment 65, further comprising assigning a more favorable prognosis to treatment with an inhibitor of anti-CD30 ligand activity or expression when the genotype is present.
[0993] 67. The method of embodiment 65, further comprising assigning a less favorable prognosis to with an inhibitor of anti-CD30 ligand activity or expression when the genotype is absent.
[0994] 68. The method of embodiment 65, further comprising assigning the subject to treatment with an inhibitor of anti-CD30 ligand activity or expression when the genotype is present.
[0995] 69. The method of embodiment 65, further comprising prescribing to the subject an inhibitor of anti-CD30 ligand activity or expression when the genotype is present.
[0996] 70. The method of embodiment 65, further comprising administering to the subject an inhibitor of anti-CD30 ligand activity or expression when the genotype is present.
[0997] 71. The method of any of embodiments 65-70, provided that the inhibitor of anti-CD30 ligand activity or expression is an anti-CD30 ligand antibody or antigen-binding fragment thereof.
[0998] 72. The method of any of embodiments 65-71, provided that assaying comprises amplifying from the genetic material at least 15 nucleobases within rs911605, wherein one of the nucleobases is at position 501 within rs911605.
[0999] 73. The method of any of embodiments 65-72, provided that assaying comprises performing a nucleic acid amplification assay comprising contacting the genetic material with a primer pair comprising SEQ ID NOS: 9-10.
[1000] 74. The method of any of embodiments 65-73, provided that assaying comprises hybridizing to the genetic material a nucleic acid comprising SEQ ID NO: 5 and/or SEQ ID NO: 6.
[1001] 75. The method of embodiment 74, provided that the nucleic acid sequence is conjugated to a detectable molecule.
[1002] 76. The method of embodiment 75, provided that the detectable molecule comprises a fluorophore.
[1003] 77. The method of any of embodiments 74-76, provided that the nucleic acid sequence is conjugated to a quencher.
[1004] 78. The method of any of embodiments 65-77, provided that assaying comprises DNA sequencing.
[1005] 79. The method of any of embodiments 65-78, further comprising measuring the level of CD30 in the subject.
[1006] 80. The method of any of embodiments 65-79, further comprising assaying the genetic material from the subject to identify the presence of absence of a “G” allele at nucleobase 501 within rs1006026 (SEQ ID NO: 3).
[1007] 81. The method of embodiment 80, provided that the assaying identifies the presence or absence of a homozygous genotype for the “G” allele at nucleobase 501 within rs1006026.
[1008] 82. The method of any of embodiments 65-81, further comprising assaying the genetic material from the subject to identify the presence of absence of SEQ ID NO: 7 and/or SEQ ID NO: 8.
[1009] 83. The method of any of embodiments 65-82, further comprising characterizing the at least one of the inflammatory disease, the fibrostenotic disease, and the fibrotic disease as Crohn's disease (CD) provided the genotype is present.
[1010] 84. The method of embodiment 83, provided that the CD comprises chronic obstructive CD.
[1011] 85. The method of any of embodiments 65-82, further comprising characterizing the at least one of the inflammatory disease, the fibrostenotic disease, and the fibrotic disease as a disease of the liver, provided the genotype is present.
[1012] 86. The method of embodiment 85, provided that the fibrotic disease is primary sclerosing cholangitis.
[1013] 87. A method comprising treating the at least one of the inflammatory disease, the fibrostenotic disease, and the fibrotic disease in the subject of any of embodiments 65-86, the method comprising:
   [1014] a) administering to the subject of any of embodiments 65-86a therapeutically effective amount of an inhibitor of CD30 ligand activity or expression, provided that the subject comprises the genotype comprising at least one of SEQ ID NO: 5 and SEQ ID NO: 6.
[1015] 88. The method of embodiment 87, provided that the inhibitor of CD30 ligand activity comprises an anti-CD30 ligand antibody or antigen binding fragment thereof.
[1016] 89. A method for detecting a genotype of interest in a subject comprising at least one of an inflammatory disease, a fibrostenotic disease, and a fibrotic disease, the method comprising:
   [1017] (a) contacting genetic material from the subject with a composition sufficiently complementary to and capable of hybridizing to the genotype of interest, the composition comprising:
      [1018] (i) a detectably labeled oligonucleotide probe comprising SEQ ID NO: 5,
      [1019] (ii) a detectably labeled oligonucleotide probe comprising SEQ ID NO: 6,
      [1020] (iii) a detectably labeled oligonucleotide probe comprising SEQ ID NO: 7,
      [1021] (iv) a detectably labeled oligonucleotide probe comprising SEQ ID NO: 8,
      [1022] (v) a detectably labeled oligonucleotide probe comprising a nucleic acid sequence that differs from a probe selected from the group consisting of (i)-(iv) by up to three nucleobases, provided the detectably labeled oligonucleotide probe of (v) hybridizes to the genotype of interest,
      [1023] (vi) a detectably labeled oligonucleotide probe comprising a nucleic acid sequence complementary to a probe selected from the group consisting of (i)-(v), or
      [1024] (vii) a combination of probes selected from the group consisting of (i)-(vi),
   [1025] (b) detecting the presence or absence of hybridization of the genetic material with the composition using the detectably labeled probe, whereby hybridization of the genetic material with the composition is indicative of the presence of the genotype of interest in the subject.
[1026] 90. The method of embodiment 89, provided that the presence of the genotype of interest is indicative of the subject comprising elevated levels of CD30 ligand.
[1027] 91. The method of embodiment 89 or embodiment 90, provided that the inflammatory disease comprises Crohn's disease (CD).
[1028] 92. The method of embodiment 91, provided that the CD comprises chronic obstructive CD.
[1029] 93. The method of any of embodiments 89-92, provided that the fibrotic disease comprises a disease of the liver.
[1030] 94. A method of treating the at least one of an inflammatory disease, a fibrostenotic disease, in the subject of any one of embodiments 85-93, the method comprising:
   [1031] a) administering to the subject of any of embodiments 85-93 a therapeutically effective amount of an inhibitor of CD30 ligand activity or expression, provided that the subject comprises the genotype of interest.
[1032] 95. The method of embodiment 94, provided that the inhibitor of CD30 ligand activity comprises an anti-CD30 ligand antibody or antigen binding fragment thereof.
[1033] 96. A composition comprising at least 10 but less than 50 contiguous nucleobase residues of SEQ ID NO: 2 or its complement, wherein the contiguous nucleobase residues comprise the nucleobase at position 501 of SEQ ID NO: 2, and wherein the contiguous nucleobase residues are connected to a detectable molecule.
[1034] 97. The composition of embodiment 96, provided that the detectable molecule is a fluorophore.
[1035] 98. The composition of embodiment 96 or embodiment 97, provided that the contiguous nucleobase residues are connected to a quencher.
[1036] 99. The composition of any of embodiments 96-98, wherein the contiguous nucleobase residues comprise SEQ ID NO: 5.
[1037] 100. The composition of any of embodiments 96-99, wherein the contiguous nucleobase residues comprise SEQ ID NO: 6.
[1038] 101. A kit comprising the composition of any of embodiments 96-100, and a primer pair having SEQ ID NOS: 9-10.
[1039] 102. A kit comprising the composition of any of embodiments 96-101, and a primer pair having SEQ ID NOS: 11-12.
[1040] 103. A kit comprising the composition of any of embodiments 96-102, and a probe comprising SEQ ID NO. 7.
[1041] 104. A kit comprising the composition of any of embodiments 96-103, and a probe comprising SEQ ID NO. 8.
[1042] 105. A method comprising contacting DNA from a subject with the composition of any of embodiments 96-100 or the kit of any of embodiments 100-104 under conditions configured to hybridize the composition to the DNA if the DNA comprises a sequence complementary to the composition.
[1043] 106. A method comprising treating the subject of embodiment 105 with an inhibitor of CD30 ligand activity or expression, provided that the DNA from the subject comprises the sequence complementary to the composition.
[1044] 107. The method of embodiment 106, provided that the inhibitor of CD30 ligand comprises an anti-CD30 ligand antibody or antigen binding fragment thereof.
[1045] 108. A method of identifying a risk of developing at least one of an inflammatory disease, a fibrostenotic disease, and a fibrotic disease in a subject, the method comprising:
   [1046] a) assaying a sample obtained from the subject to identify the presence of a genotype comprising a polymorphism associated with increased CD30 ligand expression that is in linkage disequilibrium (LD) with at least one of rs1006026 and rs911605; and
   [1047] b) identifying the risk of developing the at least one of an inflammatory disease, a fibrostenotic disease, and a fibrotic disease in a subject, provided the presence of the genotype is identified in step (a).
[1048] 109. A method of characterizing at least one of an inflammatory disease, a fibrostenotic disease, and a fibrotic disease of a subject, the method comprising:
   [1049] a) assaying a sample obtained from the subject to identify the presence of a genotype comprising a polymorphism associated with increased CD30 ligand expression that is in linkage disequilibrium (LD) with at least one of rs1006026 and rs911605; and
   [1050] b) characterizing the at least one of the inflammatory disease, the fibrostenotic disease, and the fibrotic disease as an inflammatory bowel disease (IBD) or a liver disease, provided the presence of the genotype is identified in step (a).
[1051] 110. A method of treating at least one of an inflammatory disease, a fibrostenotic disease, and a fibrotic disease in a subject, the method comprising:
   [1052] a) assaying a sample obtained from the subject to identify the presence of a genotype comprising a polymorphism associated with increased CD30 ligand expression that is in linkage disequilibrium (LD) with at least one of rs1006026 and rs911605; and
   [1053] b) administering a therapeutically effective amount of an inhibitor of CD30 ligand to the subject, provided the presence of the genotype is identified in step (a).
[1054] 111. The method of embodiments 108-110, wherein the polymorphism at rs1006026 comprises a “G” allele at nucleobase 501 within rs1006026 (SEQ ID NO: 3).
[1055] 112. The method of embodiment 111, the genotype is homozygous for the “G” allele.
[1056] 113. The method of embodiment 108-112, wherein the polymorphism at rs911605 comprises an “A” allele at nucleobase 501 within rs911605 (SEQ ID NO: 1).
[1057] 114. The methods of embodiments 108-113, wherein LD is defined by (i) a D′ value of at least about 0.70, or (ii) a D′ value of 0 and an R² value of at least about 0.70.
[1058] 115. The methods of embodiments 108-113, wherein LD is defined by (i) a D′ value of at least about 0.80, or (ii) a D′ value of 0 and an R² value of at least about 0.80.
[1059] 116. The methods of embodiments 108-113, wherein LD is defined by (i) a D′ value of at least about 0.90, or (ii) a D′ value of 0 and an R² value of at least about 0.90.
[1060] 117. The methods of embodiments 108-113, wherein LD is defined by (i) a D′ value of at least about 0.95, or (ii) a D′ value of 0 and an R² value of at least about 0.95.
[1061] 118. The method of embodiment 108-118, wherein the at least one of the inflammatory disease, the fibrostenotic disease, and the fibrotic disease is Crohn's disease (CD).
[1062] 119. The method of embodiment 118, wherein the CD is obstructive CD.
[1063] 120. The method of embodiment 118, wherein the at least one of the inflammatory disease, the fibrostenotic disease, and the fibrotic disease is a liver disease.
[1064] 121. The method of embodiment 120, wherein the liver disease is primary sclerosing cholangitis.

### Kits

[1065] The disclosure also provides kits for detecting the presence, absence, and/or quantity of a target nucleic acid described herein. In some instances, kits are provided for detecting and/or quantifying a nucleic acid sequence of genotype disclosed herein, including a polymorphism at rs911605 with an “A” at position 501. In some cases, the kits provide for detection of whether or not a subject is homozygous or heterozygous for the “A” allele at rs911605. In some instances, kits are provided for detecting and/or quantifying a nucleic acid sequence comprising an allele at rs1106026. In some cases, the allele at rs1106026 comprises an “G.” In some cases, the kits provide for detection of whether or not a subject is homozygous or heterozygous for the “G” allele at rs1006026.

[1066] In some embodiments, the kit includes nucleic acid or polypeptide isolation reagents. In some embodiments, the kit includes one or more detection reagents, for example probes and/or primers for amplification of, or hybridization to, a target nucleic acid sequence related to a disease or condition, such as an inflammatory disease, fibrostenotic disease, and/or fibrotic disease. In some embodiments, the kit includes primers and probes for control genes, such as housekeeping genes. In some embodiments, the primers and probes for control genes are used, for example, in ΔCₜ calculations. In some embodiments, the probes or primers are labeled with an enzymatic, florescent, or radionuclide label.

[1067] In some instances, kits comprise primers for identifying a polymorphism at rs911605. In some instances, kits comprise primers for identifying a polymorphism at rs1006026. In some instances, kits comprise a first primer pair for identifying rs911605 and a second primer pair for identifying rs1006026. In some instances, a primer comprises a sequence of at least about 10 contiguous nucleobases of SEQ ID NO: 1. In some cases, a primer comprises a sequence of at least about 10 contiguous nucleobases of the reverse complement of SEQ ID NO: 1. In some instances, a primer comprises a sequence of at least about 10 contiguous nucleobases of SEQ ID NO: 2. In some cases, a primer comprises a sequence of at least about 10 contiguous nucleobases of the reverse complement of SEQ ID NO: 2. In some instances, a primer comprises a sequence of at least about 10 contiguous nucleobases of SEQ ID NO: 3. In some cases, a primer comprises a sequence of at least about 10 contiguous nucleobases of the reverse complement of SEQ ID NO: 3. In some instances, a primer comprises a sequence of at least about 10 contiguous nucleobases of SEQ ID NO: 4. In some cases, a primer comprises a sequence of at least about 10 contiguous nucleobases of the reverse complement of SEQ ID NO: 4. In some instances, a primer comprises a sequence of at least about 10 contiguous nucleobases of SEQ ID NO: 5. In some cases, a primer comprises a sequence of at least about 10 contiguous nucleobases of the reverse complement of SEQ ID NO: 5. In some instances, a primer comprises a sequence of at least about 10 contiguous nucleobases of SEQ ID NO: 6. In some cases, a primer comprises a sequence of at least about 10 contiguous nucleobases of the reverse complement of SEQ ID NO: 6. In some instances, a primer comprises a sequence of at least about 10 contiguous nucleobases of SEQ ID NO: 7. In some cases, a primer comprises a sequence of at least about 10 contiguous nucleobases of the reverse complement of SEQ ID NO: 7. In some instances, a primer comprises a sequence of at least about 10 contiguous nucleobases of SEQ ID NO: 8. In some cases, a primer comprises a sequence of at least about 10 contiguous nucleobases of the reverse complement of SEQ ID NO: 8.

[1068] In some instances, a primer pair comprises SEQ ID NOS: 9 and 10. In some instances, a primer comprises at least about 70%, 80%, 85%, 90%, 91%, 92%, 93%, 94%, 95%, 96%, 97%, 98% or 99% sequence identity to SEQ ID NO: 9. In some instances, a primer comprises at least about 70%, 80%, 85%, 90%, 91%, 92%, 93%, 94%, 95%, 96%, 97%, 98% or 99% sequence identity to SEQ ID NO: 10. In some instances, a primer pair comprises SEQ ID NOS: 11 and 12. In some instances, a primer comprises at least about 70%, 80%, 85%, 90%, 91%, 92%, 93%, 94%, 95%, 96%, 97%, 98% or 99% sequence identity to SEQ ID NO: 11. In some instances, a primer comprises at least about 70%, 80%, 85%, 90%, 91%, 92%, 93%, 94%, 95%, 96%, 97%, 98% or 99% sequence identity to SEQ ID NO: 12.

[1069] In some instances, kits described herein comprise a probe. In some instances, the probe hybridizes to a polynucleotide sequence comprising an allele at rs911605. In some cases, the allele at rs911605 is an “A” allele. In some instances, the probe hybridizes to a polynucleotide sequence comprising an allele at rs1006026. In some cases, the allele at rs1006026 is a “G” allele. In some instances, the probe comprises SEQ ID NO: 13. In some instances, the probe comprises at least about 70%, 80%, 85%, 90%, 91%, 92%, 93%, 94%, 95%, 96%, 97%, 98% or 99% sequence identity to SEQ ID NO: 13. In some instances, the probe comprises SEQ ID NO: 14. In some instances, the probe comprises at least about 70%, 80%, 85%, 90%, 91%, 92%, 93%, 94%, 95%, 96%, 97%, 98% or 99% sequence identity to SEQ ID NO: 14. In some instances, the probe comprises SEQ ID NO: 15. In some instances, the probe comprises at least about 70%, 80%, 85%, 90%, 91%, 92%, 93%, 94%, 95%, 96%, 97%, 98% or 99% sequence identity to SEQ ID NO: 15. In some instances, the probe comprises SEQ ID NO: 16. In some instances, the probe comprises at least about 70%, 80%, 85%, 90%, 91%, 92%, 93%, 94%, 95%, 96%, 97%, 98% or 99% sequence identity to SEQ ID NO: 16.

[1070] Kits described herein may be used for identifying a particular genotype. In some instances, the kits are used to amplify nucleic acid material comprising or suspected of comprising a target nucleic acid sequence of a rs911605A genotype. In some instances, the kits are used to amplify nucleic acid material comprising or suspected of comprising a target nucleic acid sequence of a rs1006026G genotype. In some instances, the kits are used to amplify nucleic acid material comprising or suspected of comprising a target nucleic acid sequence of a rs911605A genotype and target nucleic acid of a rs1006026G genotype.

[1071] In some embodiments, kits include a carrier, package, or container that is compartmentalized to receive one or more containers such as vials, tubes, and the like, each of the container(s) including one of the separate elements to be used in a method described herein. Suitable containers include, for example, bottles, vials, syringes, and test tubes. In other embodiments, the containers are formed from a variety of materials such as glass or plastic.

[1072] In some embodiments, a kit includes one or more additional containers, each with one or more of various materials (such as reagents, optionally in concentrated form, and/or devices) desirable from a commercial and user standpoint for use of described herein. Non-limiting examples of such materials include, but not limited to, buffers, primers, enzymes, diluents, filters, carrier, package, container, vial and/or tube labels listing contents and/or instructions for use and package inserts with instructions for use. A set of instructions is optionally included. In a further embodiment, a label is on or associated with the container. In yet a further embodiment, a label is on a container when letters, numbers or other characters forming the label are attached, molded or etched into the container itself; a label is associated with a container when it is present within a receptacle or carrier that also holds the container, e.g., as a package insert. In other embodiments a label is used to indicate that the contents are to be used for a specific therapeutic application. In yet another embodiment, a label also indicates directions for use of the contents, such as in the methods described herein.

### Systems

[1073] Disclosed herein, in some embodiments, is a system for detecting a particular genotype in a subject. In some embodiments, the genotype comprises a polymorphism in rs911605. In some embodiments, the genotype comprises a polymorphism in rs1006026. In some embodiments, the genotype is a haplotype comprising a polymorphism in rs911605 and a polymorphism in rs1006026. The system is configured to implement the methods described in this disclosure, including, but not limited to, detecting the presence of a particular genotype to determine whether the subject is suitable for treatment with an inhibitor of CD30L.

[1074] In some embodiments, disclosed herein is a system for detecting a genotype in a subject, comprising: (a) a computer processing device, optionally connected to a computer network; and (b) a software module executed by the computer processing device to analyze a target nucleic acid sequence of a genotype comprising a polymorphism at rs911605 and/or rs1006026 in a sample from a subject. In some instances, the genotype comprises rs911605A and/or rs1006026G. In some instances, the system comprises a central processing unit (CPU), memory (e.g., random access memory, flash memory), electronic storage unit, computer program, communication interface to communicate with one or more other systems, and any combination thereof. In some instances, the system is coupled to a computer network, for example, the Internet, intranet, and/or extranet that is in communication with the Internet, a telecommunication, or data network. In some embodiments, the system comprises a storage unit to store data and information regarding any aspect of the methods described in this disclosure. Various aspects of the system are a product or article or manufacture.

[1075] One feature of a computer program includes a sequence of instructions, executable in the digital processing device's CPU, written to perform a specified task. In some embodiments, computer readable instructions are implemented as program modules, such as functions, features, Application Programming Interfaces (APIs), data structures, and the like, that perform particular tasks or implement particular abstract data types. In some embodiments, the computer program is configured to (a) receive data corresponding to a presence or an absence of a genotype of a subject; (b) detect a presence or an absence of rs911605 and/or rs1006026 (e.g., rs911605A and/or rs1006026G) and generate a score indicative of a risk that the subject has, or will develop a disease or disorder and/or respond to a therapeutic agent described herein. In some embodiments, the score is either positive or negative for the disease or disorder and/or response to the therapeutic agent. In some embodiments, the computer program is trained with plurality of training samples, and wherein the sample from the subject is independent from the plurality of training samples. In some embodiments, the training samples are derived from a reference population of individuals diagnosed with the disease or disorder, and a reference population of individual who are normal (e.g., not diagnosed with, and do not have, the disease or disorder). In some embodiments, a polygenic risk score (PRS) is calculated. In some embodiments, the PRS comprises a normalized weighted sum of a number of risk alleles within the genotype present in the subject with weights proportional to a beta value or odds ratio of association between the genotype with the disease or condition. To the extent an absence of a genotype is detected, the systems disclosed herein further comprises utilize data corresponding to a presence or an absence of a surrogate genotype to calculate the PRS. In some embodiments, a surrogate genotype is selected if it is linkage disequilibrium (LD) with the absence genotype, as determined by an r² value of at least about, 0.8, about 0.85, about 0.90, about 0.95, or about 1.0.

[1076] The functionality of the computer readable instructions are combined or distributed as desired in various environments. In some instances, a computer program comprises one sequence of instructions or a plurality of sequences of instructions. A computer program may be provided from one location. A computer program may be provided from a plurality of locations. In some embodiment, a computer program includes one or more software modules. In some embodiments, a computer program includes, in part or in whole, one or more web applications, one or more mobile applications, one or more standalone applications, one or more web browser plug-ins, extensions, add-ins, or add-ons, or combinations thereof.

### Web Application

[1077] In some embodiments, a computer program includes a web application. In light of the disclosure provided herein, those of skill in the art will recognize that a web application may utilize one or more software frameworks and one or more database systems. A web application, for example, is created upon a software framework such as Microsoft® .NET or Ruby on Rails (RoR). A web application, in some instances, utilizes one or more database systems including, by way of non-limiting examples, relational, non-relational, feature oriented, associative, and XML database systems. Suitable relational database systems include, by way of non-limiting examples, Microsoft®SQL Server, mySQL™, and Oracle®. Those of skill in the art will also recognize that a web application may be written in one or more versions of one or more languages. In some embodiments, a web application is written in one or more markup languages, presentation definition languages, client-side scripting languages, server-side coding languages, database query languages, or combinations thereof. In some embodiments, a web application is written to some extent in a markup language such as Hypertext Markup Language (HTML), Extensible Hypertext Markup Language (XHTML), or eXtensible Markup Language (XML). In some embodiments, a web application is written to some extent in a presentation definition language such as Cascading Style Sheets (CSS). In some embodiments, a web application is written to some extent in a client-side scripting language such as Asynchronous Javascript and XML (AJAX), Flash® Actionscript, Javascript, or Silverlight®. In some embodiments, a web application is written to some extent in a server-side coding language such as Active Server Pages (ASP), ColdFusion®, Perl, Java™, JavaServer Pages (JSP), Hypertext Preprocessor (PHP), Python™, Ruby, Tcl, Smalltalk, WebDNA®, or Groovy. In some embodiments, a web application is written to some extent in a database query language such as Structured Query Language (SQL). A web application may integrate enterprise server products such as IBM® Lotus Domino®. A web application may include a media player element. A media player element may utilize one or more of many suitable multimedia technologies including, by way of non-limiting examples, Adobe® Flash®, HTML 5, Apple® QuickTime®, Microsoft® Silverlight®, Java™, and Unity®.

### Mobile Application

[1078] In some instances, a computer program includes a mobile application provided to a mobile digital processing device. The mobile application may be provided to a mobile digital processing device at the time it is manufactured. The mobile application may be provided to a mobile digital processing device via the computer network described herein.

[1079] A mobile application is created by techniques known to those of skill in the art using hardware, languages, and development environments known to the art. Those of skill in the art will recognize that mobile applications may be written in several languages. Suitable programming languages include, by way of non-limiting examples, C, C++, C #, Featureive-C, Java™, Javascript, Pascal, Feature Pascal, Python™, Ruby, VB.NET, WML, and XHTML/HTML with or without CSS, or combinations thereof.

[1080] Suitable mobile application development environments are available from several sources. Commercially available development environments include, by way of non-limiting examples, AirplaySDK, alcheMo, Appcelerator®, Celsius, Bedrock, Flash Lite, .NET Compact Framework, Rhomobile, and WorkLight Mobile Platform. Other development environments may be available without cost including, by way of non-limiting examples, Lazarus, MobiFlex, MoSync, and Phonegap. Also, mobile device manufacturers distribute software developer kits including, by way of non-limiting examples, iPhone and iPad (iOS) SDK, Android™ SDK, BlackBerry® SDK, BREW SDK, Palm®OS SDK, Symbian SDK, webOS SDK, and Windows® Mobile SDK.

[1081] Those of skill in the art will recognize that several commercial forums are available for distribution of mobile applications including, by way of non-limiting examples, Apple® App Store, Android™ Market, BlackBerry® App World, App Store for Palm devices, App Catalog for webOS, Windows® Marketplace for Mobile, Ovi Store for Nokia® devices, Samsung® Apps, and Nintendo® DSi Shop.

### Standalone Application

[1082] In some embodiments, a computer program includes a standalone application, which is a program that may be run as an independent computer process, not an add-on to an existing process, e.g., not a plug-in. Those of skill in the art will recognize that standalone applications are sometimes compiled. In some instances, a compiler is a computer program(s) that transforms source code written in a programming language into binary feature code such as assembly language or machine code. Suitable compiled programming languages include, by way of non-limiting examples, C, C++, Featureive-C, COBOL, Delphi, Eiffel, Java™, Lisp, Python™, Visual Basic, and VB .NET, or combinations thereof. Compilation may be often performed, at least in part, to create an executable program. In some instances, a computer program includes one or more executable complied applications.

### Web Browser Plug-In

[1083] A computer program, in some aspects, includes a web browser plug-in. In computing, a plug-in, in some instances, is one or more software components that add specific functionality to a larger software application. Makers of software applications may support plug-ins to enable third-party developers to create abilities which extend an application, to support easily adding new features, and to reduce the size of an application. When supported, plug-ins enable customizing the functionality of a software application. For example, plug-ins are commonly used in web browsers to play video, generate interactivity, scan for viruses, and display particular file types. Those of skill in the art will be familiar with several web browser plug-ins including, Adobe® Flash® Player, Microsoft® Silverlight®, and Apple® QuickTime®. The toolbar may comprise one or more web browser extensions, add-ins, or add-ons. The toolbar may comprise one or more explorer bars, tool bands, or desk bands.

[1084] In view of the disclosure provided herein, those of skill in the art will recognize that several plug-in frameworks are available that enable development of plug-ins in various programming languages, including, by way of non-limiting examples, C++, Delphi, Java™, PHP, Python™, and VB .NET, or combinations thereof.

[1085] In some embodiments, Web browsers (also called Internet browsers) are software applications, designed for use with network-connected digital processing devices, for retrieving, presenting, and traversing information resources on the World Wide Web. Suitable web browsers include, by way of non-limiting examples, Microsoft® Internet Explorer®, Mozilla® Firefox®, Google® Chrome, Apple® Safari®, Opera Software® Opera®, and KDE Konqueror. The web browser, in some instances, is a mobile web browser. Mobile web browsers (also called mircrobrowsers, mini-browsers, and wireless browsers) may be designed for use on mobile digital processing devices including, by way of non-limiting examples, handheld computers, tablet computers, netbook computers, subnotebook computers, smartphones, music players, personal digital assistants (PDAs), and handheld video game systems. Suitable mobile web browsers include, by way of non-limiting examples, Google® Android® browser, RIM BlackBerry® Browser, Apple® Safari®, Palm® Blazer, Palm® WebOS® Browser, Mozilla® Firefox® for mobile, Microsoft® Internet Explorer® Mobile, Amazon® Kindle® Basic Web, Nokia® Browser, Opera Software® Opera® Mobile, and Sony® PSP™ browser.

### Software Modules

[1086] The medium, method, and system disclosed herein comprise one or more softwares, servers, and database modules, or use of the same. In view of the disclosure provided herein, software modules may be created by techniques known to those of skill in the art using machines, software, and languages known to the art. The software modules disclosed herein may be implemented in a multitude of ways. In some embodiments, a software module comprises a file, a section of code, a programming feature, a programming structure, or combinations thereof. A software module may comprise a plurality of files, a plurality of sections of code, a plurality of programming features, a plurality of programming structures, or combinations thereof. By way of non-limiting examples, the one or more software modules comprise a web application, a mobile application, and/or a standalone application. Software modules may be in one computer program or application. Software modules may be in more than one computer program or application. Software modules may be hosted on one machine. Software modules may be hosted on more than one machine. Software modules may be hosted on cloud computing platforms. Software modules may be hosted on one or more machines in one location. Software modules may be hosted on one or more machines in more than one location.

### Databases

[1087] The medium, method, and system disclosed herein comprise one or more databases, or use of the same. In view of the disclosure provided herein, those of skill in the art will recognize that many databases are suitable for storage and retrieval of geologic profile, operator activities, division of interest, and/or contact information of royalty owners. Suitable databases include, by way of non-limiting examples, relational databases, non-relational databases, feature oriented databases, feature databases, entity-relationship model databases, associative databases, and XML databases. In some embodiments, a database is internet-based. In some embodiments, a database is web-based. In some embodiments, a database is cloud computing-based. A database may be based on one or more local computer storage devices.

### Data Transmission

[1088] The subject matter described herein, including methods for detecting a particular genotype, are configured to be performed in one or more facilities at one or more locations. Facility locations are not limited by country and include any country or territory. In some instances, one or more steps are performed in a different country than another step of the method. In some instances, one or more steps for obtaining a sample are performed in a different country than one or more steps for detecting the presence or absence of a particular genotype from a sample. In some embodiments, one or more method steps involving a computer system are performed in a different country than another step of the methods provided herein. In some embodiments, data processing and analyses are performed in a different country or location than one or more steps of the methods described herein. In some embodiments, one or more articles, products, or data are transferred from one or more of the facilities to one or more different facilities for analysis or further analysis. An article includes, but is not limited to, one or more components obtained from a subject, e.g., processed cellular material. Processed cellular material includes, but is not limited to, cDNA reverse transcribed from RNA, amplified RNA, amplified cDNA, sequenced DNA, isolated and/or purified RNA, isolated and/or purified DNA, and isolated and/or purified polypeptide. Data includes, but is not limited to, information regarding the genotype of a subject, quantity of CD30, and any data produced by the methods disclosed herein. In some embodiments of the methods and systems described herein, the analysis is performed and a subsequent data transmission step will convey or transmit the results of the analysis.

[1089] In some embodiments, any step of any method described herein is performed by a software program or module on a computer. In additional or further embodiments, data from any step of any method described herein is transferred to and from facilities located within the same or different countries, including analysis performed in one facility in a particular location and the data shipped to another location or directly to an individual in the same or a different country. In additional or further embodiments, data from any step of any method described herein is transferred to and/or received from a facility located within the same or different countries, including analysis of a data input, such as genetic or processed cellular material, performed in one facility in a particular location and corresponding data transmitted to another location, or directly to an individual, such as data related to the diagnosis, prognosis, responsiveness to therapy, or the like, in the same or different location or country.

[1090] Disclosed herein, in some embodiments, are the following:
[1091] 1. A computer system for evaluating a sample from a subject, the system comprising:
   [1092] a) a central computing environment;
   [1093] b) an input device operatively connected to said central computing environment, wherein said input device is configured to receive a presence or absence of a genotype that correlates with a disease state in the sample;
   [1094] c) a trained algorithm executed by said central computing environment, wherein the trained algorithm is configured to use the presence or absence of the genotype to classify said sample as a disease or normal sample; and d) an output device operatively connected to said central computing environment, wherein said output device is configured to provide information on the classification to a user.
[1095] 2. The computer system of embodiment 1, wherein the disease state comprises at least one of an inflammatory disease, a fibrostenotic disease, and a fibrotic disease.
[1096] 3. The computer system of embodiment 1 or embodiment 2, wherein the disease state is selected from the group consisting of inflammatory bowel disease (IBD), Crohn's disease (CD), obstructive CD, ulcerative colitis (UC), intestinal fibrosis, intestinal fibrostenosis, and primary sclerosing cholangitis.
[1097] 4. The computer system of any previous embodiment, wherein the sample comprises whole blood, plasma, serum, or tissue.
[1098] 5. The computer system of any previous embodiment, wherein the genotype comprises at least one polymorphism selected from any one of Tables 1-14, a polymorphism in linkage disequilibrium (LD) therewith, and any combination thereof.
[1099] 6. The computer system of any previous embodiment, wherein the genotype comprises at least one of a polymorphism at rs1006026, rs911605, and a polymorphism in linkage disequilibrium (LD) therewith, or any combination thereof.
[1100] 7. The computer system of embodiment 6, wherein the polymorphism at rs1006026 comprises a “G” allele at nucleobase 501 within rs1006026 (SEQ ID NO: 3).
[1101] 8. The computer system of embodiment 7, wherein the genotype is homozygous for the “G” allele.
[1102] 9. The computer system of claim 6, wherein the polymorphism at rs911605 comprises an “A” allele at nucleobase 501 within rs911605 (SEQ ID NO: 1).
[1103] 10. The computer system of embodiment 5-9, where LD is defined by an r² value of at least 0.80, 0.85, 0.90, 0.95, or 1.0.
[1104] 11. The computer system of any previous embodiment, wherein the genotype is associated with a risk that a subject has, or will develop, the disease state by a P value of at most about 1.0×10⁻⁶, about 1.0×10⁻⁷, about 1.0×10⁻⁸, about 1.0×10⁻⁹, about 1.0×10⁻¹⁰, about 1.0×10⁻²⁰, about 1.0×10⁻³⁰, about 1.0×10⁴⁰, about 1.0×10⁵⁰, about 1.0×10⁻⁶⁰, about 1.0×10⁻⁷⁰, about 1.0×10⁻⁸⁰, about 1.0×10⁻⁹⁰, or about 1.0×10⁻¹⁰⁰.
[1105] 12. The computer system of any previous embodiment, wherein said output device provides a report summarizing said information on said classification.
[1106] 13. The computer system of any previous embodiment, wherein said report comprises a recommendation for treatment of said disease state.
[1107] 14. The computer system of embodiment 13, wherein the treatment comprises administration of an inhibitor of CD30 ligand activity or expression.
[1108] 15. The computer system of embodiment 14, wherein the inhibitor of CD30 ligand activity or expression comprises an antibody or antigen-binding fragment, peptide, or small molecule.
[1109] 16. The computer system of any preceding embodiment, wherein said genotype is determined with an assay comprising polymerase chain reaction (PCR), quantitative reverse-transcription PCR (qPCR), automated sequencing, genotype array, or a combination thereof.
[1110] 17. Use of a composition comprising one or more binding agents for generating a report that classifies a sample from as subject as disease or non-disease of a disease state, wherein the one or more binding agents specifically bind to at least one of rs1006026 (SEQ ID NO: 4), rs911605 (SEQ ID NO: 2), their compliment, a polymorphism in linkage disequilibrium therewith, and any combination thereof.
[1111] 18. The use of embodiment 17, wherein generating the report further comprises:
   [1112] a) providing the sample from the subject;
   [1113] b) assaying the sample from the subject for detecting the presence of the one or more polymorphisms in one or more genes;
   [1114] c) generating the report based on the result of step (b); and
   [1115] d) determining whether said subject has or is likely to have the disease based on the results of step (b).
[1116] 19. The use of embodiment 17 or 18, wherein the disease state comprises at least one of an inflammatory disease, a fibrostenotic disease, and a fibrotic disease.
[1117] 20. The use of embodiment 17-19, wherein the disease state is selected from the group consisting of inflammatory bowel disease (IBD), Crohn's disease (CD), obstructive CD, ulcerative colitis (UC), intestinal fibrosis, intestinal fibrostenosis, and primary sclerosing cholangitis.
[1118] 21. The use of any of embodiments 17-20, wherein the sample comprises whole blood, plasma, serum, or tissue.
[1119] 22. The use of embodiment 18, wherein assaying the sample from the subject for detecting the presence of the one or more polymorphisms of step (b) comprises:
   [1120] a) contacting the sample with the one or more binding agents that specifically bind to the one or more polymorphisms; and
   [1121] b) determining whether the sample specifically binds to said one or more binding agents, wherein binding of the sample to the one or more binding agents indicates the presence of the polymorphism in the subject.
[1122] 23. The use of embodiment 18, wherein assaying the sample from the subject for detecting the presence of the one or more polymorphisms of step (b) comprises sequencing of the sample.
[1123] 24. The use of embodiment 18, wherein assaying the sample from the subject for detecting the presence of the one or more polymorphisms of step (b) comprises quantifying the amount of DNA comprising the at least one of rs1006026 (SEQ ID NO: 4) rs911605 (SEQ ID NO: 2).
[1124] 25. The use of embodiment 24, wherein the quantifying comprises PCR.
[1125] 26. The use of embodiment 25, wherein the PCR comprises real-time PCR.
[1126] 27. The use of embodiment 24, wherein the quantifying comprises hybridization.
[1127] 28. A composition comprising one or more binding agents that specifically bind to at least one of rs1006026 (SEQ ID NO: 4) rs911605 (SEQ ID NO: 2), or their complement, wherein the one or more binding agents are selected to classify a sample as disease or non-disease of a disease state.
[1128] 29. The composition of embodiment 28, wherein the one or more binding agents comprise oligonucleotides.
[1129] 30. The composition of embodiment 29, wherein the oligonucleotides comprise RNA or DNA.
[1130] 31. The composition of embodiment 29, wherein the one or more binding agents comprise aptamers, antibodies, peptide nucleic acids, or pyranosyl RNA.
[1131] 32. A kit for detecting at least one of an inflammatory disease, a fibrostenotic disease, and a fibrotic disease in a subject, the kit comprising:
   [1132] a) at least one binding agent that specifically binds to at least one of rs1006026 (SEQ ID NO: 4) rs911605 (SEQ ID NO: 2), or their complement, wherein the at least one binding agent is selected to detect a disease or non-disease state; and
   [1133] b) reagents for detecting binding of said at least one binding agent to a DNA sample from a subject.
[1134] 33. The kit of embodiment 32, wherein the at least one binding agent comprises at least one oligonucleotide.
[1135] 34. The kit of embodiment 32, wherein the at least one binding agent comprises at least one aptamer, antibody, peptide nucleic acid, or pyranosyl RNA.
[1136] 35. The kit of embodiment 32-34, wherein the at least one binding agent is labelled with a detectable label.
[1137] 36. The kit of embodiment 32-35 wherein the at least one binding agent is immobilized to a surface.
[1138] 37. A system for generating a report that classifies a sample a disease or non-disease of a disease state, comprising:
   [1139] a) a computer system that;
      [1140] i. generates a molecular profile of a DNA sample based upon the presence of at least one polymorphism, or their complement; and
      [1141] ii. generates a report that classifies the sample based on said molecular profile; and
   [1142] b) a computer screen that displays said report.
[1143] 38. The system of embodiment 37, wherein the presence of the at least one polymorphism is based on the result of an assay of said DNA sample, which result is entered into a database.
[1144] 39. The system of embodiment 37-38, further comprising an input for said result.
[1145] 40. The system of claim 37-39, wherein the at least one polymorphism is selected from any one of Tables 1-14.
[1146] 41. The system of claim 37-41, wherein the at least one polymorphism comprises at least one of a polymorphism at rs1006026 (SEQ ID NO: 4), rs911605 (SEQ ID NO: 2), and a polymorphism in linkage disequilibrium therewith.
[1147] 42. The system of claim 41, wherein the polymorphism at rs1006026 is homozygous.

### Definitions

[1148] In the following description, certain specific details are set forth in order to provide a thorough understanding of various embodiments. However, one skilled in the art will understand that the embodiments provided may be practiced without these details. Unless the context requires otherwise, throughout the specification and claims which follow, the word “comprise” and variations thereof, such as, “comprises” and “comprising” are to be construed in an open, inclusive sense, that is, as “including, but not limited to.” As used in this specification and the appended claims, the singular forms “a,” “an,” and “the” include plural referents unless the content clearly dictates otherwise. It should also be noted that the term “or” is generally employed in its sense including “and/or” unless the content clearly dictates otherwise. Further, headings provided herein are for convenience only and do not interpret the scope or meaning of the claimed embodiments.

[1149] As used herein, the terms “homologous,” “homology,” or “percent homology” when used herein to describe to an amino acid sequence or a nucleic acid sequence, relative to a reference sequence, can be determined using the formula described by Karlin and Altschul (Proc. Natl. Acad. Sci. USA 87: 2264-2268, 1990, modified as in Proc. Natl. Acad. Sci. USA 90:5873-5877, 1993). Such a formula is incorporated into the basic local alignment search tool (BLAST) programs of Altschul et al. (J Mol Biol. 1990 Oct. 5; 215(3):403-10; Nucleic Acids Res. 1997 Sep. 1; 25(17):3389-402). Percent homology of sequences can be determined using the most recent version of BLAST, as of the filing date of this application. Percent identity of sequences can be determined using the most recent version of BLAST, as of the filing date of this application.

[1150] The terms “increased,” or “increase” are used herein to generally mean an increase by a statically significant amount. In some embodiments, the terms “increased,” or “increase,” mean an increase of at least 10% as compared to a reference level, for example an increase of at least about 10%, at least about 20%, or at least about 30%, or at least about 40%, or at least about 50%, or at least about 60%, or at least about 70%, or at least about 80%, or at least about 90% or up to and including a 100% increase or any increase between 10-100% as compared to a reference level, standard, or control. Other examples of “increase” include an increase of at least 2-fold, at least 5-fold, at least 10-fold, at least 20-fold, at least 50-fold, at least 100-fold, at least 1000-fold or more as compared to a reference level.

[1151] The terms, “decreased” or “decrease” are used herein generally to mean a decrease by a statistically significant amount. In some embodiments, “decreased” or “decrease” means a reduction by at least 10% as compared to a reference level, for example a decrease by at least about 20%, or at least about 30%, or at least about 40%, or at least about 50%, or at least about 60%, or at least about 70%, or at least about 80%, or at least about 90% or up to and including a 100% decrease (e.g., absent level or non-detectable level as compared to a reference level), or any decrease between 10-100% as compared to a reference level. In the context of a marker or symptom, by these terms is meant a statistically significant decrease in such level. The decrease can be, for example, at least 10%, at least 20%, at least 30%, at least 40% or more, and is preferably down to a level accepted as within the range of normal for an individual without a given disease.

[1152] The terms “subject” encompass mammals. Non-limiting examples of mammal include, any member of the mammalian class: humans, non-human primates such as chimpanzees, and other apes and monkey species; farm animals such as cattle, horses, sheep, goats, swine; domestic animals such as rabbits, dogs, and cats; laboratory animals including rodents, such as rats, mice and guinea pigs, and the like. In one aspect, the mammal is a human. The term “animal” as used herein comprises human beings and non-human animals. In one embodiment, a “non-human animal” is a mammal, for example a rodent such as rat or a mouse. In some instances, a human subject is a “patient,” which as used herein, refers to a subject who may be diagnosed with a disease or condition disclosed herein.

[1153] The term “gene,” as used herein, refers to a segment of nucleic acid that encodes an individual protein or RNA (also referred to as a “coding sequence” or “coding region”), optionally together with associated regulatory region such as promoter, operator, terminator and the like, which may be located upstream or downstream of the coding sequence. A “genetic locus” referred to herein, is a particular location within a gene.

[1154] The term, “genotype” as disclosed herein, refers to the chemical composition of polynucleotide sequences within the genome of an individual. In some embodiments, the genotype comprises a single nucleotide polymorphism (SNP) or and indel (insertion or deletion, of a nucleobase within a polynucleotide sequence). In some embodiments, a genotype for a particular SNP, or indel is heterozygous. In some embodiments, a genotype for a particular SNP, or indel is homozygous.

[1155] A “polymorphism” as used herein refers to an aberration in (e.g., a mutation), or of (e.g., insertion/deletion), a nucleic acid sequence, as compared to the nucleic acid sequence in a reference population. In some embodiments, the polymorphism is common in the reference population. In some embodiments, the polymorphism is rare in the reference population.

[1156] The term, “single nucleotide polymorphism” or SNP as disclosed herein, refers to a variation in a single nucleotide within a polynucleotide sequence. The term should not be interpreted as placing a restriction on a frequency of the SNP in a given population. The variation of an SNP may have multiple different forms. A single form of an SNP is referred to as an “allele.” An SNP can be mono-, bi-, tri, or tetra-allelic. A SNP may include a “risk allele,” a “protective allele,” or neither. By way of example, a reference polynucleotide sequence reading 5′ to 3′ is TTACG. A SNP at allele position 3 (of 5′-TTACG-3′) comprise a substitution of the reference allele, “A” to a non-reference allele, “C.” If the “C” allele of the SNP is associated with an increased probability of developing a phenotypic trait, the allele is considered a “risk” allele. However, the same SNP may also comprise a substitution of the “A” allele to a “T” allele at position 3. If the T allele of the SNP is associated with a decreased probability of developing a phenotypic trait, the allele is considered a “protective” allele. The SNP may be observed in at least 1% of a given population. In some embodiments, the SNP is represented by an “rs” number, which refers to the accession of reference cluster of one more submitted SNPs in the dbSNP bioinformatics database as of the filing date of this patent application, and which is included within a sequence that comprises the total number of nucleobases from 5′ to 3′. In some embodiments, a SNP may be further defined by the position of the SNP (nucleobase) within the dbSNP sequence, the position of which is always with reference to 5′ length of the sequence plus 1. In some embodiments, a SNP is defined as the genomic position in a reference genome and the allele change (e.g. chromosome 7 at position 234,123,567 from G allele to A allele in the reference human genome build 37). In some embodiments, the SNV is defined as the genomic position identified with [brackets] or an “N” in a sequence disclosed herein.

[1157] The term, “indel,” as disclosed herein, refers to an insertion, or a deletion, of a nucleobase within a polynucleotide sequence. An indel can be mono-, bi-, tri, or tetra-allelic. An indel may be “risk,” a “protective,” or neither, for a phenotypic trait. In some embodiments, the indel is represented by an “rs” number, which refers to the accession of reference cluster of one more submitted indels in the dbSNP bioinformatics database as of the filing date of this patent application, and which is included in a sequence that comprises the total number of nucleobases from 5′ to 3′. In some embodiments, an indel may be further defined by the position of the insertion/deletion within the dbSNP sequence, the position of which is always with reference to the 5′ length of the sequence plus 1. In some embodiments, an indel is defined as the genomic position in a reference genome and the allele change. In some embodiments, the indel is defined as the genomic position identified with [brackets] or an “N” in a sequence disclosed herein.

[1158] “Haplotype” as used herein, encompasses a group of one or more genotypes, which tend to be inherited together in a reference population. In some embodiments, a haplotype comprises particular polymorphism or another polymorphism in linkage disequilibrium (LD) therewith.

[1159] “Linkage disequilibrium,” or “LD,” as used herein refers to the non-random association of alleles or indels in different gene loci in a given population. LD may be defined by a D′ value corresponding to the difference between an observed and expected allele or indel frequencies in the population (D=Pab−PaPb), which is scaled by the theoretical maximum value of D. LD may be defined by an r² value corresponding to the difference between an observed and expected unit of risk frequencies in the population (D=Pab−PaPb), which is scaled by the individual frequencies of the different loci. In some embodiments, D′ comprises at least 0.20. In some embodiments, r² comprises at least 0.70.

[1160] The term “medically refractory,” or “refractory,” as used herein, refers to the failure of a standard treatment to induce remission of a disease. In some embodiments, the disease comprises an inflammatory disease disclosed herein. A non-limiting example of refractory inflammatory disease includes refractory Crohn's disease, and refractory ulcerative colitis (e.g., mrUC). Non-limiting examples of standard treatment include glucocorticosteriods, anti-TNF therapy, anti-a4-b7 therapy (vedolizumab), anti-IL12p40 therapy (ustekinumab), Thalidomide, and Cytoxin.

[1161] The terms “treat,” “treating,” and “treatment” as used herein refers to alleviating or abrogating a disorder, disease, or condition; or one or more of the symptoms associated with the disorder, disease, or condition; or alleviating or eradicating a cause of the disorder, disease, or condition itself. Desirable effects of treatment can include, but are not limited to, preventing occurrence or recurrence of disease, alleviation of symptoms, diminishing any direct or indirect pathological consequences of the disease, preventing metastasis, decreasing the rate of disease progression, amelioration or palliation of the disease state and remission or improved prognosis.

[1162] The term “therapeutically effective amount” refers to the amount of a compound or therapy that, when administered, is sufficient to prevent development of, or alleviate to some extent, one or more of the symptoms of a disorder, disease, or condition of the disease; or the amount of a compound that is sufficient to elicit biological or medical response of a cell, tissue, system, animal, or human that is being sought by a researcher, veterinarian, medical doctor, or clinician.

[1163] The term “pharmaceutically acceptable carrier,” “pharmaceutically acceptable excipient,” “physiologically acceptable carrier,” or “physiologically acceptable excipient” refers to a pharmaceutically-acceptable material, composition, or vehicle, such as a liquid or solid filler, diluent, excipient, solvent, or encapsulating material. A component can be “pharmaceutically acceptable” in the sense of being compatible with the other ingredients of a pharmaceutical formulation. It can also be suitable for use in contact with the tissue or organ of humans and animals without excessive toxicity, irritation, allergic response, immunogenicity, or other problems or complications, commensurate with a reasonable benefit/risk ratio. See, Remington: The Science and Practice of Pharmacy, 21st Edition; Lippincott Williams & Wilkins: Philadelphia, PA, 2005; Handbook of Pharmaceutical Excipients, 5th Edition; Rowe et al., Eds., The Pharmaceutical Press and the American Pharmaceutical Association: 2005; and Handbook of Pharmaceutical Additives, 3rd Edition; Ash and Ash Eds., Gower Publishing Company: 2007; Pharmaceutical Preformulation and Formulation, Gibson Ed., CRC Press LLC: Boca Raton, FL, 2004).

[1164] The term “pharmaceutical composition” refers to a mixture of a compound disclosed herein with other chemical components, such as diluents or carriers. The pharmaceutical composition can facilitate administration of the compound to an organism. Multiple techniques of administering a compound exist in the art including, but not limited to, oral, injection, aerosol, parenteral, and topical administration.

[1165] The term “inflammatory bowel disease” or “IBD” as used herein refers to gastrointestinal disorders of the gastrointestinal tract. Non-limiting examples of IBD include, Crohn's disease (CD), ulcerative colitis (UC), indeterminate colitis (IC), microscopic colitis, diversion colitis, Behcet's disease, and other inconclusive forms of IBD. In some instances, IBD comprises fibrosis, fibrostenosis, stricturing and/or penetrating disease, obstructive disease, or a disease that is refractory (e.g., mrUC, refractory CD), perianal CD, or other complicated forms of IBD.

[1166] Non-limiting examples of “sample” include any material from which nucleic acids and/or proteins can be obtained. As non-limiting examples, this includes whole blood, peripheral blood, plasma, serum, saliva, mucus, urine, semen, lymph, fecal extract, cheek swab, cells or other bodily fluid or tissue, including but not limited to tissue obtained through surgical biopsy or surgical resection. In various embodiments, the sample comprises tissue from the large and/or small intestine. In various embodiments, the large intestine sample comprises the cecum, colon (the ascending colon, the transverse colon, the descending colon, and the sigmoid colon), rectum and/or the anal canal. In some embodiments, the small intestine sample comprises the duodenum, jejunum, and/or the ileum. Alternatively, a sample can be obtained through primary patient derived cell lines, or archived patient samples in the form of preserved samples, or fresh frozen samples.

[1167] The term “biomarker” comprises a measurable substance in a subject whose presence, level, or activity, is indicative of a phenomenon (e.g., phenotypic expression or activity; disease, condition, subclinical phenotype of a disease or condition, infection; or environmental stimuli). In some embodiments, a biomarker comprises a gene, gene expression product (e.g., RNA or protein), or a cell-type (e.g., immune cell).

[1168] The term “serological marker,” as used herein refers to a type of biomarker representing an antigenic response in a subject that may be detected in the serum of the subject. In some embodiments, a serological comprises an antibody against various fungal antigens. Non-limiting examples of a serological marker comprise anti-Saccharomyces cerevisiae antibody (ASCA), an anti-neutrophil cytoplasmic antibody (ANCA), E. coli outer membrane porin protein C (OmpC), anti-Malassezia restricta antibody, anti-Malassezia pachydermatis antibody, anti-Malassezia furfur antibody, anti-Malassezia globasa antibody, anti-Cladosporium albicans antibody, anti-laminaribiose antibody (ALCA), anti-chitobioside antibody (ACCA), anti-laminarin antibody, anti-chitin antibody, pANCA antibody, anit-I2 antibody, and anti-Cbir1 flagellin antibody.

[1169] The term “microbiome” and its variation used herein describe the populations and interactions of the bacteria, fungi, protists, and virus that align the gastrointestinal tract of a subject. A subject afflicted with IBD may possess presence, absence, excess, diminished, or a combination thereof of a microbiome s compared to a healthy subject.

[1170] The terms “non-response,” or “loss-of-response,” as used herein, refer to phenomena in which a subject or a patient does not respond to the induction of a standard treatment (e.g., anti-TNF therapy), or experiences a loss of response to the standard treatment after a successful induction of the therapy. The induction of the standard treatment may include 1, 2, 3, 4, or 5, doses of the therapy. A “successful induction” of the therapy may be an initial therapeutic response or benefit provided by the therapy. The loss of response may be characterized by a reappearance of symptoms consistent with a flare after a successful induction of the therapy.

### EXAMPLES

[1171] While preferred embodiments have been shown and described herein, it will be obvious to those skilled in the art that such embodiments are provided by way of example only. Numerous variations, changes, and substitutions will now occur to those skilled in the art without departing from the embodiments provided. It should be understood that various alternatives to the embodiments described herein may be employed.

### Example 1: Identification of Genotypes

[1172] Patients with IBD were recruited at the Cedars-Sinai Inflammatory Bowel Disease Centers. The diagnosis of each patient was based on standard endoscopic, histologic, and radiographic features. Blood samples were collected from patients at the time of enrollment. Blood samples were also collected from individuals without IBD. Genotyping was performed at Cedars-Sinai Medical Center using Illumina whole-genome arrays per manufacturer's protocol (Illumina, San Diego, CA) on all samples collected Markers/SNPs were excluded from analysis if: there were deviations in Hardy-Weinberg Equilibrium in controls with p≤0.0001; missingness in SNPs >2% and minor allele frequency <1%. Related individuals (Pi-hat scores >0.25) were identified using identity-by-descent and excluded from analysis (PLINK). Admixture was used to generate ethnicity proportion estimations for all individuals. Only subjects identified by admixture as Caucasian (proportion <0.75) were included in the analysis.

[1173] Multiple large-scale case-control association studies involving Inflammatory Bowel Disease (IBD) Crohn's disease (CD), and ulcerative colitis (UC) in Caucasian populations using gene-based single nucleotide polymorphism (SNP) markers were performed. The studies included patients recruited at the Cedars-Sinai Inflammatory Bowel Disease Centers with Inflammatory Bowel Disease (IBD) (n=9360), Crohn's disease (CD)(n=7965), and ulcerative colitis (UC) (n=6864). The studies also included GWAS data derived from the International Inflammatory Bowel Diseases Genetic Consortium (IIBDGC). A P value cutoff of 0.05 was used. Table 2 provides SNPs identified as being associated with IBD. Table 1 provides SNPs identified as being associated with CD. Table 3 provides SNPs identified as being associated with UC. The allele “A” within rs911605 (rs911605A) SNP was show to be significantly associated with IBD (P=5.21×10⁻⁴), Crohn's disease (CD) (rP=1.70×10⁻³) and ulcerative colitis (UC) (P=4.54×10⁻²). The rs1006026G was show to be moderately associated with IBD (P=6.67×10⁻¹), CD (P=4.43×10⁻¹), and UC (P=8.92×10⁻¹).

### Example 2: eQTL in Small Bowel Resection Identifies Polymorphisms as Functionally Related to CD30L Protein Expression

[1174] 85 Caucasian patients with Crohn's disease (CD) who underwent small bowel resection were recruited at the Cedars-Sinai Inflammatory Bowel Disease Centers. The diagnosis of each patient was based on standard endoscopic, histologic, and radiographic features. Patients were selected based on being diagnosed with CD and having undergone small bowel resection for disease. Tissue biopsy samples were collected from uninvolved tissue sections taken from small bowel resection after surgery. Expression Quantitative Trait Loci Mapping (eQTL) was performed on these samples. Table 13 provides polymorphisms associated with a decrease in CD30. Table 14 provides polymorphisms associated with an increase in CD30. Negative beta values represent a decrease in gene expression, whereas positive beta values represent an increase in gene expression, in the tissue samples. Positive beta values were observed for the polymorphisms rs911605 (SEQ ID NO: 2) and rs1006026 (SEQ ID NO: 4). FIG. 1 shows that the risk allele, “A” within rs911605 (P=4.41×10⁴)—rs911605A (X=1) or rs911605AA (X=2) is associated with increased expression of TNFSF8 mRNA in the small bowel using cis-eQTL, as compared to individuals who do not carry the risk allele, or “non-risk, GG” (X=0). Without being bound by any particular theory, this is highly suggestive that expression of these polymorphisms is associated with increased CD30L protein expression in subjects with CD. Increased CD30L is defined as +2 standard deviation over the mean CD30L level of a control derived from a non-diseased individual or population of non-diseased individuals.

### Example 3. Polymorphism Expression Effects Expression and Function of CD30L and Pro-Inflammatory Cytokines in Peripheral Blood

[1175] Patients with Crohn's Disease (CD) were recruited at the Cedars-Sinai Inflammatory Bowel Disease Centers. The diagnosis of each patient was based on standard endoscopic, histologic, and radiographic features. Patients were selected based on being diagnosed with CD. Samples of peripheral blood were collected from patients at the time of enrollment. Peripheral blood mononuclear cells (PBMC) were isolated on standard Ficoll-Hypaque density gradients. PBMC were stimulated in vitro under conditions that would up-regulate either CD30L (phorbol 12-myristate 13-acetate (PMA) and ionomycin) or CD30 (anti-CD3 antibody and anti-CD28 antibody) for 72 hours. Supernatants were collected for analysis of cytokines at 6, 24 and 72, hours and cells were collected after 72 hours and analyzed for expression of CD30 and CD30L by flow cytometry. Both T and B cells expressed increased levels of CD30L in subjects that carried (either homozygous or heterozygous) the risk polymorphism for rs911605 (rs911605A or rs911605AA) (FIG. 2). Analysis of TNF-alpha, interleukin 6 (IL-6), and interferon-gamma (IFN-gamma) in the supernatants from cultures showed that cells from patients that carried the polymorphism for rs911605 produced elevated levels of pro-inflammatory cytokines following stimulation (FIGS. 3-5). Without being bound by any particular theory, these findings are highly suggestive that the genotype comprising rs911605A or rs911605AA is correlated with an increase in expression of CD30L and pro-inflammatory cytokines involved in the pathogenesis of IBD.

### Example 4. Soluble CD30 (sCD30) Levels Correlate with CD30L Expression on T and B Cells in Subject Carrying Refined Patient Selection Genotypes

[1176] PBMC were stimulated in vitro under conditions that would up-regulate either CD30L (phorbol 12-myristate 13-acetate (PMA) and ionomycin) or CD30 (anti-CD3 antibody and anti-CD28 antibody) for 72 hours. Supernatants were collected for analysis of sCD30 at 72, hours and cells were collected after 72 hours and analyzed for expression of CD30 and CD30L by flow cytometry. Analysis showed that sCD30 levels correlate with CD30L expression on T and B cells in the genetically refined patient population (rs911605AA+rs1006026GG). FIG. 6A shows sCD30 levels correlate with CD30L expression on T cells in the genetically refined patient population defined by rs911605AA+rs1006026AA/GA/GG. FIG. 6B shows sCD30 levels correlate with CD30L expression on T cells in the genetically refined patient population defined by rs911605AA+rs1006026GA/GG. FIG. 6C shows sCD30 levels correlate with CD30L expression on T cells in the genetically refined patient population defined by rs911605AA+rs1006026GG. FIG. 7A shows sCD30 levels correlate with CD30L expression on B cells in the genetically refined patient population defined by rs911605AA+rs1006026AA/GA/GG. FIG. 7B shows sCD30 levels correlate with CD30L expression on B cells in the genetically refined patient population defined by rs911605AA+rs1006026GA/GG. FIG. 7C shows sCD30 levels correlate with CD30L expression on B cells in the genetically refined patient population defined by rs911605AA+rs1006026GG.

### Example 5. Polymorphisms Associated with Subclinical Phenotypes of Inflammatory Bowel Disease (Cedars-Sinai Cohort)

[1177] Patients with IBD were recruited at the Cedars-Sinai Inflammatory Bowel Disease Centers. The diagnosis of each patient was based on standard endoscopic, histologic, and radiographic features. Blood samples were collected from patients at the time of enrollment. Blood samples were also collected from individuals without IBD. Genotyping was performed at Cedars-Sinai Medical Center using Illumina whole-genome arrays per manufacturer's protocol (Illumina, San Diego, CA) on all samples collected Markers/SNPs were excluded from analysis if: there were deviations in Hardy-Weinberg Equilibrium in controls with p≤0.0001; missingness in SNPs >2% and minor allele frequency <1%. Related individuals (Pi-hat scores >0.25) were identified using identity-by-descent and excluded from analysis (PLINK). Admixture was used to generate ethnicity proportion estimations for all individuals. Only subjects identified by admixture as Caucasian (proportion <0.75) were included in the analysis.

Polymorphisms Associated with Serologies

[1178] Serum samples were obtained from all patients and tested for the presence of antibodies against Saccharomyces cerevisiae (ASCA), and Cbir1 flagellin. Genotyping was performed at Cedars-Sinai Medical Center using Illumina whole-genome arrays per manufacturer's protocol (Illumina, San Diego, CA) on blood samples collected from the patients. The results showed, provided in Table 6, polymorphisms significantly associated with a presence of ASCA in patients diagnosed with ulcerative colitis. The results also showed, as provided in Table 7, polymorphisms significantly associated with a presence of anti-Cbir1 antibodies in patients diagnosed with ulcerative colitis.

Polymorphisms Associated with Loss of Response to an Anti-TNF Therapy

[1179] Genotyping was performed Cedars-Sinai Medical Center using Illumina whole-genome arrays per manufacturer's protocol (Illumina, San Diego, CA) on blood samples collected from the patients with UC (n=99) who suffer from secondary loss of response to an anti-TNF therapy. Secondary non-response, or “loss-of-response,” refers to the loss of response during maintenance after a successful induction of the anti-TNF therapy. Table 4 provides a list of polymorphisms associated with a loss of response to an anti-TNF therapy in patients with UC.

Polymorphisms Associated with Primary Sclerosing Cholangitis

[1180] Genotyping was performed Cedars-Sinai Medical Center using Illumina whole-genome arrays per manufacturer's protocol (Illumina, San Diego, CA) on blood samples collected from the patients with UC (n=115) who suffer from primary sclerosing cholangitis (PSC). Table 5 provides a list of polymorphisms associated with a PSC in patients with UC.

Polymorphisms Associated with a Time to First Surgery and a Time to Second Surgery

[1181] Genotyping was performed Cedars-Sinai Medical Center using Illumina whole-genome arrays per manufacturer's protocol (Illumina, San Diego, CA) on blood samples collected from the patients with CD (n=1091) who underwent a First Surgery, usually a small bowel resection. Genotyping was performed on blood samples collected from the patients with UC (n=181) who underwent a Second Surgery. A First Surgery is defined as a time between a first diagnosis of CD and a time of a first surgical intervention to treat the CD. A Second Surgery is defined as a time between the First Surgery and a second surgical intervention to treat the CD. Table 8 and 9 provides a list of polymorphisms associated with a faster time to a First Surgery, an a faster time to Second surgery, respectively, in patients with CD.

Polymorphisms Associated with Paneth Cell Defects

[1182] Genotyping was performed Cedars-Sinai Medical Center using Illumina whole-genome arrays per manufacturer's protocol (Illumina, San Diego, CA) on blood samples collected from the patients with CD with the D0 (n=297), D1234 (n=297), D2 (n=297), D3 (n−297), and D5 (n=155), Paneth cell phenotypes as determined by VanDussen et al., Genetic Variants Synthesize to Produce Paneth Cell Phenotypes That Define Subtypes of Crohn's Disease, Gastroenterology 2014; 146:200-209. Table 10 provides a list of polymorphisms associated with the above Paneth cell phenotypes in patients with CD.

Polymorphisms Associated with Thrombus Development

[1183] Genotyping was performed Cedars-Sinai Medical Center using Illumina whole-genome arrays per manufacturer's protocol (Illumina, San Diego, CA) on blood samples collected from the patients with UC (n=116) with thrombus formation. Table 11 provides a list of polymorphisms associated with the above thrombus formation in patients with US.

Polymorphisms Associated with Stricturing and/or Penetrating Disease

[1184] Genotyping was performed Cedars-Sinai Medical Center using Illumina whole-genome arrays per manufacturer's protocol (Illumina, San Diego, CA) on blood samples collected from the patients with CD with non-stricturing and non-penetrating disease in the ileum of the small intestine (n=2906), stricturing and penetrating disease in the ileum (n=6002), and stricturing and penetrating disease in the ileocolonic region of the intestine (n=6064). Table 12 provides a list of polymorphisms associated with stricturing and/or penetrating disease in patients with CD.

### Example 6. Genotyping by Quantitative Polymerase Chain Reaction (qPCR)

[1185] The presence or absence of rs911605A genotype in a subject is performed by quantitative polymerase chain reaction (qPCR). Optionally the presence or absence of rs1006026G in the subject is performed by qPCR. The subject presents with obstructive Crohn's disease.

[1186] Genomic DNA is purified from a serum sample of the subject. The DNA is aliquoted into a well of a PCR plate or a PCR tube. A mixture comprising primers (SEQ ID NOS: 9, 10), and optionally, (SEQ ID NOS:11, 12) and TaqMan master mix is prepared, and an aliquot of the mixture is added to the PCR well or tube comprising DNA. qPCR is performed as follows: 95° C. for 10 minutes; 40 cycles of 95° C. for 0.15 seconds and 60° C. for 1 minute; and hold at 4° C. The reporter dye is FAM, and the quenching dye is MGB-NFQ.

[1187] The number of cycles required to reach the cycle threshold (Ct) is evaluated, where Ct values below 30 cycles indicate presence of the genotype. The subject has a Ct value below 30 cycles.

### Example 7. Treatment with Anti-CD30L Antibody

[1188] The subject having the presence of rs911605A genotype of Example 3 is treated with an anti-CD30L antibody selected from: an antibody comprising a HC variable domain comprising SEQ ID NO: 136 and a LC variable domain comprising SEQ ID NO: 137, a HC variable domain comprising SEQ ID NO: 138 and a LC variable domain comprising SEQ ID NO: 139, a HC variable domain comprising SEQ ID NO: 140 and a LC variable domain comprising SEQ ID NO: 141, a HC variable domain comprising SEQ ID NO: 142 and a LC variable domain comprising SEQ ID NO: 143, a HC variable domain comprising SEQ ID NO: 144 and a LC variable domain comprising SEQ ID NO: 145, a HC variable domain comprising SEQ ID NO: 146 and a LC variable domain comprising SEQ ID NO: 154, a HC variable domain comprising SEQ ID NO: 147 and a LC variable domain comprising SEQ ID NO: 154, a HC variable domain comprising SEQ ID NO: 148 and a LC variable domain comprising SEQ ID NO: 154, a HC variable domain comprising SEQ ID NO: 149 and a LC variable domain comprising SEQ ID NO: 154, a HC variable domain comprising SEQ ID NO: 150 and a LC variable domain comprising SEQ ID NO: 154, a HC variable domain comprising SEQ ID NO: 151 and a LC variable domain comprising SEQ ID NO: 154, a HC variable domain comprising SEQ ID NO: 152 and a LC variable domain comprising SEQ ID NO: 154, and a HC variable domain comprising SEQ ID NO: 153 and a LC variable domain comprising SEQ ID NO: 154.

### Example 8. Quantification of Soluble CD30

[1189] The quantity of soluble CD30 is determined from a sample of serum from a subject. The assay employs an antibody specific for human CD30 coated on a 96-well plate. Standards and the sample from the subject are pipetted into the wells and CD30 present in a sample is bound to the wells by the immobilized antibody. The wells are washed and biotinylated anti-Human CD30 antibody is added. After washing away unbound biotinylated antibody, HRP-conjugated streptavidin is pipetted to the wells. The wells are again washed, a TMB substrate solution is added to the wells and color develops in proportion to the amount of CD30 bound. The Stop Solution changes the color from blue to yellow, and the intensity of the color is measured at 450 nm. The quantity of CD30 in the sample from the subject is determined by comparison to a standard curve. The subject is treated if he has an elevated level of CD30, which may be defined by +2 standard deviation above the mean for a control derived from anon-diseased individual, or population of non-diseased individuals.

### Example 9. Treatment with Anti-CD30L Antibody

[1190] The subject having elevated CD30 is treated with an anti-CD30L antibody selected from: an antibody comprising a HC variable domain comprising SEQ ID NO: 136 and a LC variable domain comprising SEQ ID NO: 137, a HC variable domain comprising SEQ ID NO: 138 and a LC variable domain comprising SEQ ID NO: 139, a HC variable domain comprising SEQ ID NO: 140 and a LC variable domain comprising SEQ ID NO: 141, a HC variable domain comprising SEQ ID NO: 142 and a LC variable domain comprising SEQ ID NO: 143, a HC variable domain comprising SEQ ID NO: 144 and a LC variable domain comprising SEQ ID NO: 145, a HC variable domain comprising SEQ ID NO: 146 and a LC variable domain comprising SEQ ID NO: 154, a HC variable domain comprising SEQ ID NO: 147 and a LC variable domain comprising SEQ ID NO: 154, a HC variable domain comprising SEQ ID NO: 148 and a LC variable domain comprising SEQ ID NO: 154, a HC variable domain comprising SEQ ID NO: 149 and a LC variable domain comprising SEQ ID NO: 154, a HC variable domain comprising SEQ ID NO: 150 and a LC variable domain comprising SEQ ID NO: 154, a HC variable domain comprising SEQ ID NO: 151 and a LC variable domain comprising SEQ ID NO: 154, a HC variable domain comprising SEQ ID NO: 152 and a LC variable domain comprising SEQ ID NO: 154, and a HC variable domain comprising SEQ ID NO: 153 and a LC variable domain comprising SEQ ID NO: 154.

### Example 10. Phase 1A Clinical Trial

[1191] A phase 1 clinical trial is performed to evaluate the safety, tolerability, pharmacokinetics and pharmacodynamics of an anti-CD30L antibody in subjects having rs911605A positive Crohn's disease (carrier of “A” at position 501 of SEQ ID NO: 1).

[1192] Single ascending dose (SAD) arms: Subjects in each group (subjects are grouped based on the presence or absence of rs911605A genotype) receive either a single dose of the antibody or a placebo. Exemplary doses are 1, 3, 10, 30, 100, 300, 600 and 800 mg of antibody. Safety monitoring and PK assessments are performed for a predetermined time. Based on evaluation of the PK data, and if the antibody is deemed to be well tolerated, dose escalation occurs, either within the same groups or a further group of healthy subjects. Dose escalation continues until the maximum dose has been attained unless predefined maximum exposure is reached or intolerable side effects become apparent.

[1193] Multiple ascending dose (MAD) arms: Subjects in each group (subjects are grouped based on the presence or absence of rs911605A genotype) receive multiple doses of the antibody or a placebo. The dose levels and dosing intervals are selected as those that are predicted to be safe from the SAD data. Dose levels and dosing frequency are chosen to achieve therapeutic drug levels within the systemic circulation that are maintained at steady state for several days to allow appropriate safety parameters to be monitored. Samples are collected and analyzed to determination PK profiles.

[1194] Inclusion Criteria: Subjects of non-childbearing potential between the ages of 18 and 55 years having obstructive Crohn's disease. Female subjects of non-childbearing potential must meet at least one of the following criteria: (1) achieved postmenopausal status, defined as: cessation of regular menses for at least 12 consecutive months with no alternative pathological or physiological cause; and have a serum follicle stimulating hormone (FSH) level within the laboratory's reference range for postmenopausal females; (2) have undergone a documented hysterectomy and/or bilateral oophorectomy; (3) have medically confirmed ovarian failure. All other female subjects (including females with tubal ligations and females that do not have a documented hysterectomy, bilateral oophorectomy and/or ovarian failure) will be considered to be of childbearing potential. Body Mass Index (BMI) of 17.5 to 30.5 kg/m2; and a total body weight >50 kg (110 lbs). Evidence of a personally signed and dated informed consent document indicating that the subject (or a legal representative) has been informed of all pertinent aspects of the study.

[1195] Two groups of subjects are selected: subjects having rs911605A genotype, and subjects lacking the genotype.

[1196] Exclusion Criteria: Evidence or history of clinically significant hematological, renal, endocrine, pulmonary, gastrointestinal, cardiovascular, hepatic, psychiatric, neurologic, or allergic disease (including drug allergies, but excluding untreated, asymptomatic, seasonal allergies at time of dosing) or than Crohn's disease. Subjects with a history of or current positive results for any of the following serological tests: Hepatitis B surface antigen (HBsAg), Hepatitis B core antibody (HBcAb), anti-Hepatitis C antibody (HCV Ab) or human immunodeficiency virus (HIV). Subjects with a history of allergic or anaphylactic reaction to a therapeutic drug. Treatment with an investigational drug within 30 days (or as determined by the local requirement, whichever is longer) or 5 half-lives or 180 days for biologics preceding the first dose of study medication. Pregnant females; breastfeeding females; and females of childbearing potential.

[1197] Primary Outcome Measures: Incidence of dose limiting or intolerability treatment related adverse events (AEs) [Time Frame: 12 weeks]. Incidence, severity and causal relationship of treatment emergent AEs (TEAEs) and withdrawals due to treatment emergent adverse events [Time Frame: 12 weeks]. Incidence and magnitude of abnormal laboratory findings [Time Frame: 12 weeks]. Abnormal and clinically relevant changes in vital signs, blood pressure (BP) and electrocardiogram (ECG) parameters [Time Frame: 12 weeks].

### Secondary Outcome Measures:

[1198] Single Ascending Dose: Maximum Observed Plasma Concentration (Cmax) [Time Frame: 12 weeks]. Single Ascending Dose: Time to Reach Maximum Observed Plasma Concentration (Tmax) [Time Frame: 12 weeks]. Single Ascending Dose: Area under the plasma concentration-time profile from time zero to 14 days (AUC14 days) [Time Frame: 12 weeks]. Single Ascending Dose: Area under the plasma concentration-time profile from time zero extrapolated to infinite time (AUCinf) [Time Frame: 12 weeks]. Single Ascending Dose: Area under the plasma concentration-time profile from time zero to the time of last quantifiable concentration (AUClast) [Time Frame: 12 weeks]. Single Ascending Dose: Dose normalized maximum plasma concentration (Cmax[dn]) [Time Frame: 12 weeks]. Single Ascending Dose: Dose normalized area under the plasma concentration-time profile from time zero extrapolated to infinite time (AUCinf[dn]) [Time Frame: 12 weeks]. Single Ascending Dose: Dose normalized area under the plasma concentration-time profile from time zero to the time of last quantifiable concentration (AUClast[dn]) [Time Frame: 12 weeks]. Single Ascending Dose: Plasma Decay Half-Life (t½) [Time Frame: 12 weeks]. Plasma decay half-life is the time measured for the plasma concentration to decrease by one half. Single Ascending Dose: Mean residence time (MRT) [Time Frame: 12 weeks]. Single Ascending Dose: Volume of Distribution at Steady State (Vss) [Time Frame: 6 weeks]. Volume of distribution is defined as the theoretical volume in which the total amount of drug would need to be uniformly distributed to produce the desired blood concentration of a drug. Steady state volume of distribution (Vss) is the apparent volume of distribution at steady-state. Single Ascending Dose: Systemic Clearance (CL) [Time Frame: 6]. CL is a quantitative measure of the rate at which a drug substance is removed from the body.

[1199] Multiple Ascending Dose First Dose: Maximum Observed Plasma Concentration (Cmax) [Time Frame: 12 weeks]. Multiple Ascending Dose First Dose: Time to Reach Maximum Observed Plasma Concentration (Tmax) [Time Frame: 12 weeks]. Multiple Ascending Dose First Dose: Area under the plasma concentration-time profile from time zero to time i, the dosing interval where τ=2 weeks (AUCτ) [Time Frame: 12 weeks]. Multiple Ascending Dose First Dose: Dose normalized maximum plasma concentration (Cmax[dn]) [Time Frame: 12 weeks]. Multiple Ascending Dose First Dose: Dose normalized Area under the plasma concentration-time profile from time zero to time i, the dosing interval where τ=2 weeks (AUCτ [dn]) [Time Frame: 12 weeks]. Plasma Decay Half-Life (t½) [Time Frame: 12 weeks]. Plasma decay half-life is the time measured for the plasma concentration to decrease by one half. Multiple Ascending Dose First Dose: Mean residence time (MRT) [Time Frame: 12 weeks]. Apparent Volume of Distribution (Vz/F) [Time Frame: 12 weeks]. Volume of distribution is defined as the theoretical volume in which the total amount of drug would need to be uniformly distributed to produce the desired plasma concentration of a drug. Apparent volume of distribution after oral dose (Vz/F) is influenced by the fraction absorbed. Multiple Ascending Dose First Dose: Volume of Distribution at Steady State (Vss) [Time Frame: 12 weeks]. Volume of distribution is defined as the theoretical volume in which the total amount of drug would need to be uniformly distributed to produce the desired blood concentration of a drug. Steady state volume of distribution (Vss) is the apparent volume of distribution at steady-state. Multiple Ascending Dose First Dose: Apparent Oral Clearance (CL/F) [Time Frame: 12 weeks]. Clearance of a drug is a measure of the rate at which a drug is metabolized or eliminated by normal biological processes. Clearance obtained after oral dose (apparent oral clearance) is influenced by the fraction of the dose absorbed. Clearance is estimated from population pharmacokinetic (PK) modeling. Drug clearance is a quantitative measure of the rate at which a drug substance is removed from the blood. Multiple Ascending Dose First Dose: Systemic Clearance (CL) [Time Frame: 12 weeks]. CL is a quantitative measure of the rate at which a drug substance is removed from the body.

[1200] Multiple Ascending Dose Multiple Dose: Maximum Observed Plasma Concentration (Cmax) [Time Frame: 12 weeks]. Multiple Ascending Dose Multiple Dose: Time to Reach Maximum Observed Plasma Concentration (Tmax) [Time Frame: 12 weeks]. Multiple Ascending Dose Multiple Dose: Area under the plasma concentration-time profile fromtime zero to time i, the dosing interval where τ=2 weeks (AUCtτ) [Time Frame: 12 weeks]. Multiple Ascending Dose Multiple Dose: Dose normalized maximum plasma concentration (Cmax[dn]) [Time Frame: 12 weeks]. Multiple Ascending Dose Multiple Dose: Dose normalized Area under the plasma concentration-time profile from time zero to time τ, the dosing interval where τ=2 weeks (AUCtτ [dn]) [Time Frame: 12 weeks]. Multiple Ascending Dose Multiple Dose: Plasma Decay Half-Life (t½) [Time Frame: 12 weeks]. Plasma decay half-life is the time measured for the plasma concentration to decrease by one half. Multiple Ascending Dose Multiple Dose: Apparent Volume of Distribution (Vz/F) [Time Frame: 12 weeks]. Volume of distribution is defined as the theoretical volume in which the total amount of drug would need to be uniformly distributed to produce the desired plasma concentration of a drug. Apparent volume of distribution after oral dose (Vz/F) is influenced by the fraction absorbed. Multiple Ascending Dose Multiple Dose: Volume of Distribution at Steady State (Vss) [Time Frame: 12 weeks]. Volume of distribution is defined as the theoretical volume in which the total amount of drug would need to be uniformly distributed to produce the desired blood concentration of a drug. Steady state volume of distribution (Vss) is the apparent volume of distribution at steady-state.

[1201] Multiple Ascending Dose Multiple Dose: Apparent Oral Clearance (CL/F) [Time Frame: 12 weeks]. Clearance of a drug is a measure of the rate at which a drug is metabolized or eliminated by normal biological processes. Clearance obtained after oral dose (apparent oral clearance) is influenced by the fraction of the dose absorbed. Clearance was estimated from population pharmacokinetic (PK) modeling. Drug clearance is a quantitative measure of the rate at which a drug substance is removed from the blood. Multiple Ascending Dose Multiple Dose: Systemic Clearance (CL) [Time Frame: 12 weeks]. CL is a quantitative measure of the rate at which a drug substance is removed from the body. Multiple Ascending Dose Multiple Dose: Minimum Observed Plasma Trough Concentration (Cmin) [Time Frame: 12 weeks]. Multiple Ascending Dose Multiple Dose: Average concentration at steady state (Cav) [Time Frame: 12 weeks]. Multiple Ascending Dose Multiple Dose: Observed accumulation ratio (Rac) [Time Frame: 12 weeks]. Multiple Ascending Dose Multiple Dose: Peak to trough fluctuation (PTF) [Time Frame: 12 weeks]. Multiple Ascending Dose Additional Parameter: estimate of bioavailability (F) for subcutaneous administration at the corresponding intravenous dose [Time Frame: 12 weeks]. Immunogenicity for both Single Ascending Dose and Multiple Ascending Dose: Development of anti-drug antibodies (ADA) [Time Frame: 12 weeks].

### Example 11: Phase 1B Clinical Trial

[1202] A phase 1b open label clinical trial is performed to evaluate efficacy of an anti-CD30L antibody on patients having a rs911605A genotype (carrier of “A” at position 501 of SEQ ID NO: 1) and obstructive Crohn's disease.

[1203] Arms: 10 patients positive for rs911605A are administered the antibody. 5-10 patients negative for rs911605A are administered the antibody. Patients are monitored in real-time. Central ready of endoscopy and biopsy is employed, with readers blinded to point of time of treatment and endpoints.

[1204] Inclusion Criteria: Two groups of subjects are selected: subjects having rs911605A genotype, and subjects lacking rs911605A genotype.

[1205] Primary Outcome Measures: Simple Endoscopic Score for Crohn's Disease (SESCD), Crohn's Disease Activity Index (CDAI), and Patient Reported Outcome (PRO). If the rs911605A genotype positive group shows 50% reduction from baseline, a Phase 2a clinical trial is performed.

[1206] Inclusion Criteria: PRO entry criteria: Abdominal pain score of 2 or more and/or stool frequency score of 4 or more. Primary outcome would be pain core of 0 or 1 and stool frequency score of 3 or less with no worsening from baseline. Endoscopy entry criteria: SESCD ileum only entry at score of 4 and 6 if colon is involved. Primary endoscopic outcome is 40-50% delta of mean SESCD.

### Example 12: Phase 2A Clinical Trial

[1207] A phase 2a clinical trial is performed to evaluate efficacy of an anti-CD30L antibody on patients having a rs911605A genotype (carrier of “A” at position 501 of SEQ ID NO: 1) and obstructive Crohn's disease.

[1208] Arms: 40 patients per arm (antibody and placebo arms) are treated with antibody or placebo for 12 weeks. An interim analysis is performed after 20 patients from each group are treated at the highest dose to look for a 40-50% delta between placebo and treated group in primary outcome (50% reduction from baseline in SESCD, CDAI, and PRO).

[1209] Primary Outcome Measures: Simple Endoscopic Score for Crohn's Disease (SESCD), Crohn's Disease Activity Index (CDAI), and Patient Reported Outcome (PRO).

[1210] Inclusion Criteria: PRO entry criteria: Abdominal pain score of 2 or more and/or stool frequency score of 4 or more. Primary outcome would be pain core of 0 or 1 and stool frequency score of 3 or less with no worsening from baseline. Endoscopy entry criteria: SESCD ileum only entry at score of 4 and 6 if colon is involved. Primary endoscopic outcome is 40-50% delta of mean SESCD.

[1211] While preferred embodiments have been shown and described herein, it will be obvious to those skilled in the art that such embodiments are provided by way of example only. Numerous variations, changes, and substitutions will occur to those skilled in the art without departing from the scope of this application. Various alternatives to the embodiments described herein may be employed in practicing the scope of this application.

1-8. (canceled)

9. A method of treating moderate to severe Crohn's disease (CD) in a subject, the method comprising:
a) identifying a subject with CD as being a carrier of a genotype comprising a polymorphism at least one of rs911605 and rs1006026, the genotype associated with a risk that the subject will develop a moderate to severe form of CD comprising obstructive CD; and
b) administering to the subject a therapeutically effective amount of an inhibitor of CD30 ligand (CD30L) activity or expression.

10. The method of claim 9, further comprising determining whether the subject has or will develop at least one of a non-response or a loss-of-response to a standard treatment.

11. The method of claim 10, wherein the standard treatment is selected from the group consisting of glucocorticosteriods, anti-TNF therapy, anti-a4-b7 therapy, anti-IL12p40 therapy, Thalidomide, and Cytoxan.

12. The method of claim 9, wherein the polymorphism at rs911605 comprises an “A” allele at nucleobase 501 within rs911605 (SEQ ID NO: 1), and wherein the polymorphism at rs1006026 comprises a “G” allele at nucleobase 501 within rs1006026 (SEQ ID NO: 3).

13. The method of claim 12, wherein the genotype comprises the polymorphism at rs911605 and the polymorphism at rs1006026.

14. The method of claim 9, wherein the inhibitor of CD30 ligand activity is an antibody or an antigen-binding fragment targeting CD30 ligand or CD30, or a combination thereof.

15-30. (canceled)

31. The method of claim 11, wherein the anti-a4-b7 therapy is vedolizumab.

32. The method of claim 11, wherein the anti-IL12p40 therapy is ustekinumab.

The application's sequence listing, which the Patent Office published only in electronic form, follows.

SEQUENCE LISTING (200291 sequences)

SEQ ID NO: 1 - DNA, 1001 bp, Homo sapiens
  source 1..1001: mol_type = other DNA
attaaaattatgtctgatagtatattttcagaagtctgggtaattcagtctagagaatagctatatatgaggttttgtgatttattagaatccacttaagttcccttttttcatatccttctttttttatttttattttttattttagatggagtttcgctgttgttgtctgggctggagtgcaatggcgcaatctcgcctcacttcactgcatcctctgcctcctgggttcaagtgattctcctgcctcagcctcccaagtagctgggattacaggcgtgtgccaccatgctttgctaattttgtatttttttttttttagtagagatgaggtttcaccatgttggtcaggctagtctcaaactcctgacctcaagtgatccacctgcctcggcctcctaaagtgctgggattacagatgtgagccactgtgcccggcctcatatccttttaaggcaccatctggtctcttctaaactcccttgagtggttgattgaagraaaacatctaagaacaaataattttcttggaacagtacattctaagtctatattttagagacattttgattaaaattattttcattattatgaagacattcaaatcctcacatgtctctggtttactggttgtaaagaaaaaaatcctcacatctctaacctccttattttaaaacatgatctttttggaagctattcctttctcactgcttttggtggatttgcctctgaggccttttcttttttaagtttactacttcttcatattgttggatagatattatcaagtccatggtcaaaaatcatgcattagcccatggaatcccttagcactcagaggcatgttctatacatgattccaacaaagttggtactcccctctcacagctgacaatattgaaaaggtcagatagacagtgatcatatggttctctttgtgggaaaatttatgatgtatgtgtgtgtgtgtgttgtaagtgtgtatatctaaacatacctgg

SEQ ID NO: 2 - DNA, 1001 bp, Homo sapiens
  source 1..1001: mol_type = other DNA
attaaaattatgtctgatagtatattttcagaagtctgggtaattcagtctagagaatagctatatatgaggttttgtgatttattagaatccacttaagttcccttttttcatatccttctttttttatttttattttttattttagatggagtttcgctgttgttgtctgggctggagtgcaatggcgcaatctcgcctcacttcactgcatcctctgcctcctgggttcaagtgattctcctgcctcagcctcccaagtagctgggattacaggcgtgtgccaccatgctttgctaattttgtatttttttttttttagtagagatgaggtttcaccatgttggtcaggctagtctcaaactcctgacctcaagtgatccacctgcctcggcctcctaaagtgctgggattacagatgtgagccactgtgcccggcctcatatccttttaaggcaccatctggtctcttctaaactcccttgagtggttgattgaagaaaaacatctaagaacaaataattttcttggaacagtacattctaagtctatattttagagacattttgattaaaattattttcattattatgaagacattcaaatcctcacatgtctctggtttactggttgtaaagaaaaaaatcctcacatctctaacctccttattttaaaacatgatctttttggaagctattcctttctcactgcttttggtggatttgcctctgaggccttttcttttttaagtttactacttcttcatattgttggatagatattatcaagtccatggtcaaaaatcatgcattagcccatggaatcccttagcactcagaggcatgttctatacatgattccaacaaagttggtactcccctctcacagctgacaatattgaaaaggtcagatagacagtgatcatatggttctctttgtgggaaaatttatgatgtatgtgtgtgtgtgtgttgtaagtgtgtatatctaaacatacctgg

SEQ ID NO: 3 - DNA, 1001 bp, Homo sapiens
  misc_difference 501: note = a, c, t, g, unknown or other
  source 1..1001: mol_type = other DNA
ttatatatcaccatcgccacccatttttccaccatctctctctctctctcagcagttctagttggatcctttaactaaagaacttcttaaaggacacttcaatttcttttctttggccattgctataaaatgacatacccttggttcactccaaattagaattacagaaattgcagagcccctgcagaagaaaagatgtcctaaagtgttttcaagattattatacttaatagatgtagataagccattaaattatgagttttaagaattccactatctaaatcaaatatttgcaactccttcttttcacttttgtagagatatgagcttcaaagcttccatttaatttcaaagcttgatgacacttgagaaatagatatcaaagccttttaaagcctagttctttccagcaattgataagctatagagtacttggcctaagaaaactgaagaaaaaccagaataaattcagcaggattataataccacgaaaagtaggcnctatgaagtaagaaacagaaatattctcactttggcaggtcatgtgggtgggtgcagctcttaaattacccattaacaacttcatcaaaaaattcatgagcaatatatgctattactacagcattttctatataatatatactggtagattctctgtaaacaccaattttctaaaatatgaagaagcttcctctttctcctcctcttctgttttcagaaacaaatcttaccatttacttcaaagtaaatctccgaagacagtctgaccctgtacagtgtgtacccaacgattgcttagtattgtgaggaacatcagagagaacaggtgctaaaaacctttcaactttctgcttctatgtgctgtttcttttttttttttttttgtgacgccctaacttcttcaaagttgtggcttaagaggaagctttcgatttgtcttgctggctttaacaccaaaatgtccaaagctctaagaagccatggtcttctctttcgcctcc

SEQ ID NO: 4 - DNA, 1001 bp, Homo sapiens
  source 1..1001: mol_type = other DNA
ttatatatcaccatcgccacccatttttccaccatctctctctctctctcagcagttctagttggatcctttaactaaagaacttcttaaaggacacttcaatttcttttctttggccattgctataaaatgacatacccttggttcactccaaattagaattacagaaattgcagagcccctgcagaagaaaagatgtcctaaagtgttttcaagattattatacttaatagatgtagataagccattaaattatgagttttaagaattccactatctaaatcaaatatttgcaactccttcttttcacttttgtagagatatgagcttcaaagcttccatttaatttcaaagcttgatgacacttgagaaatagatatcaaagccttttaaagcctagttctttccagcaattgataagctatagagtacttggcctaagaaaactgaagaaaaaccagaataaattcagcaggattataataccacgaaaagtaggcgctatgaagtaagaaacagaaatattctcactttggcaggtcatgtgggtgggtgcagctcttaaattacccattaacaacttcatcaaaaaattcatgagcaatatatgctattactacagcattttctatataatatatactggtagattctctgtaaacaccaattttctaaaatatgaagaagcttcctctttctcctcctcttctgttttcagaaacaaatcttaccatttacttcaaagtaaatctccgaagacagtctgaccctgtacagtgtgtacccaacgattgcttagtattgtgaggaacatcagagagaacaggtgctaaaaacctttcaactttctgcttctatgtgctgtttcttttttttttttttttgtgacgccctaacttcttcaaagttgtggcttaagaggaagctttcgatttgtcttgctggctttaacaccaaaatgtccaaagctctaagaagccatggtcttctctttcgcctcc

SEQ ID NO: 5 - DNA, 51 bp, Homo sapiens
  source 1..51: mol_type = other DNA
aactcccttgagtggttgattgaagraaaacatctaagaacaaataatttt

SEQ ID NO: 6 - DNA, 51 bp, Homo sapiens
  source 1..51: mol_type = other DNA
aaaattatttgttcttagatgttttrcttcaatcaaccactcaagggagtt

SEQ ID NO: 7 - DNA, 51 bp, Homo sapiens
  source 1..51: mol_type = other DNA
gattataataccacgaaaagtaggcrctatgaagtaagaaacagaaatatt

SEQ ID NO: 8 - DNA, 51 bp, Homo sapiens
  source 1..51: mol_type = other DNA
aatatttctgtttcttacttcatagrgcctacttttcgtggtattataatc

SEQ ID NO: 9 - DNA, 22 bp, synthetic construct
  misc_feature 1..22: note = Description of Artificial Sequence: Synthetic oligonucleotide
  source 1..22: mol_type = other DNA
cctcctaaagtgctgggattac

SEQ ID NO: 10 - DNA, 22 bp, synthetic construct
  misc_feature 1..22: note = Description of Artificial Sequence: Synthetic oligonucleotide
  source 1..22: mol_type = other DNA
accagagacatgtgaggatttg

SEQ ID NO: 11 - DNA, 25 bp, synthetic construct
  misc_feature 1..25: note = Description of Artificial Sequence: Synthetic oligonucleotide
  source 1..25: mol_type = other DNA
aagcttgatgacacttgagaaatag

SEQ ID NO: 12 - DNA, 21 bp, synthetic construct
  misc_feature 1..21: note = Description of Artificial Sequence: Synthetic oligonucleotide
  source 1..21: mol_type = other DNA
actaagcaatcgttgggtaca

SEQ ID NO: 13 - DNA, 101 bp, synthetic construct
  misc_feature 1..101: note = Description of Artificial Sequence: Synthetic polynucleotide
  source 1..101: mol_type = other DNA
ttaaggcaccatctggtctcttctaaactcccttgagtggttgattgaagaaaaacatctaagaacaaataattttcttggaacagtacattctaagtcta

SEQ ID NO: 14 - DNA, 101 bp, synthetic construct
  misc_feature 1..101: note = Description of Artificial Sequence: Synthetic polynucleotide
  source 1..101: mol_type = other DNA
tagacttagaatgtactgttccaagaaaattatttgttcttagatgtttttcttcaatcaaccactcaagggagtttagaagagaccagatggtgccttaa

SEQ ID NO: 15 - DNA, 101 bp, synthetic construct
  misc_feature 1..101: note = Description of Artificial Sequence: Synthetic polynucleotide
  source 1..101: mol_type = other DNA
agaaaaaccagaataaattcagcaggattataataccacgaaaagtaggcgctatgaagtaagaaacagaaatattctcactttggcaggtcatgtgggtg

SEQ ID NO: 16 - DNA, 101 bp, synthetic construct
  misc_feature 1..101: note = Description of Artificial Sequence: Synthetic polynucleotide
  source 1..101: mol_type = other DNA
cacccacatgacctgccaaagtgagaatatttctgtttcttacttcatagcgcctacttttcgtggtattataatcctgctgaatttattctggtttttct

SEQ ID NO: 17-99 - skipped (83 entries)

SEQ ID NO: 100 - protein, 5 aa, Homo sapiens
SYIWS

SEQ ID NO: 101 - protein, 16 aa, Homo sapiens
RIYASGNTNYNPSLKS

SEQ ID NO: 102 - protein, 16 aa, Homo sapiens
DYRVAGTYYYYYGLDV

SEQ ID NO: 103 - protein, 14 aa, Homo sapiens
TGTSSDVGVYDYVS

SEQ ID NO: 104 - protein, 7 aa, Homo sapiens
EVSNRPS

SEQ ID NO: 105 - protein, 10 aa, Homo sapiens
SSYTSRSTWV

SEQ ID NO: 106 - protein, 5 aa, Homo sapiens
SYYWT

SEQ ID NO: 107 - protein, 16 aa, Homo sapiens
RIYTSGITNYNPSLKS

SEQ ID NO: 108 - protein, 16 aa, Homo sapiens
ERVVGASRYYYYGVDV

SEQ ID NO: 109 - protein, 14 aa, Homo sapiens
TGTSSDVGLYNYVS

SEQ ID NO: 110 - protein, 7 aa, Homo sapiens
EVNNRPS

SEQ ID NO: 111 - protein, 10 aa, Homo sapiens
SSYTSSSTWV

SEQ ID NO: 112 - protein, 5 aa, Homo sapiens
SYYWT

SEQ ID NO: 113 - protein, 16 aa, Homo sapiens
RIYTSGITNYNPSLKS

SEQ ID NO: 114 - protein, 16 aa, Homo sapiens
ERVVGASRYYYYGVDV

SEQ ID NO: 115 - protein, 14 aa, Homo sapiens
TGTSSDIGLYDYVS

SEQ ID NO: 116 - protein, 7 aa, Homo sapiens
EVNNRPS

SEQ ID NO: 117 - protein, 10 aa, Homo sapiens
SSYTSSSTWV

SEQ ID NO: 118 - protein, 5 aa, Homo sapiens
SYSWS

SEQ ID NO: 119 - protein, 16 aa, Homo sapiens
RTSTSGRNNYNPSLKS

SEQ ID NO: 120 - protein, 16 aa, Homo sapiens
DFTIAARRYYYYGMDV

SEQ ID NO: 121 - protein, 14 aa, Homo sapiens
TGTSSDIGLYNYVS

SEQ ID NO: 122 - protein, 7 aa, Homo sapiens
EVINRPS

SEQ ID NO: 123 - protein, 10 aa, Homo sapiens
SSYTSSSTWV

SEQ ID NO: 124 - protein, 5 aa, Homo sapiens
NNYWS

SEQ ID NO: 125 - protein, 16 aa, Homo sapiens
RVYSSGLTNYKPSLKS

SEQ ID NO: 126 - protein, 16 aa, Homo sapiens
ERATVTTRYHYDGMDV

SEQ ID NO: 127 - protein, 14 aa, Homo sapiens
TGSSSDIGTYNYVS

SEQ ID NO: 128 - protein, 7 aa, Homo sapiens
EVNNRPS

SEQ ID NO: 129 - protein, 10 aa, Homo sapiens
SSYSSSSTWV

SEQ ID NO: 130 - protein, 5 aa, Homo sapiens
SYYWS

SEQ ID NO: 131 - protein, 16 aa, Homo sapiens
RIFASGSTNYNPSLRS

SEQ ID NO: 132 - protein, 16 aa, Homo sapiens
ERVGVQDYYHYSGMDV

SEQ ID NO: 133 - protein, 14 aa, Homo sapiens
TGTSSDVGLYNYVS

SEQ ID NO: 134 - protein, 7 aa, Homo sapiens
EVSKRPS

SEQ ID NO: 135 - protein, 10 aa, Homo sapiens
SSYTSSSTWV

SEQ ID NO: 136 - protein, 124 aa, Homo sapiens
QVQLQESGPGLVKPSETLSLTCTVSGGSISSYYWTWIRQPAGKGLEWIGRIYTSGITNYNPSLKSRVTMSVDTSKNQFSLKLSSVTAADTAVYYCARERVVGASRYYYYGVDVWGQGTTVTVSS

SEQ ID NO: 137 - protein, 110 aa, Homo sapiens
QSALTQPASVSGSPGQSITISCTGTSSDVGLYNYVSWYQQHPDKAPKLMIFEVNNRPSGVSNRFSGSNSGNTASLTISGLQAEDEADYYCSSYTSSSTWVFGGGTKLTVL

SEQ ID NO: 138 - protein, 124 aa, Homo sapiens; identical to SEQ ID NO: 136

SEQ ID NO: 139 - protein, 110 aa, Homo sapiens
QSALTQPASVSGSPGQSITISCTGTSSDIGLYDYVSWYQQHPDRAPKLIIFEVNNRPSGVSYRFSGSNSGNTASLTISGLQAEDEADYYCSSYTSSSTWVFGGGTKLTVL

SEQ ID NO: 140 - protein, 124 aa, Homo sapiens
QVQLQESGPGLVKPSETLSLTCTVSGGSISSYSWSWIRQPAGKGLEWIGRTSTSGRNNYNPSLKSRVTMSVDTSKNQFSLKLNSVTAADTAVYYCARDFTIAARRYYYYGMDVWGQGTTVTVSS

SEQ ID NO: 141 - protein, 110 aa, Homo sapiens
QSALTQPASVSGSPGQSITISCTGTSSDIGLYNYVSWYQQHPGKAPKLIIYEVINRPSGVSNRFSGSESGNTASLTISGLQAEDEANYYCSSYTSSSTWVFGGGTKLTVL

SEQ ID NO: 142 - protein, 124 aa, Homo sapiens
QVQLQESGPRLVKPSETLSLTCTVSGGSITNNYWSWIRQPAGKGLEWIGRVYSSGLTNYKPSLKSRVTMSVDTSKNQFSLRLNSVTAADTAVYYCARERATVTTRYHYDGMDVWGQGTSVTVSS

SEQ ID NO: 143 - protein, 110 aa, Homo sapiens
QSALTQPASVSGSPGQSITISCTGSSSDIGTYNYVSWYQQYPGKAPELMIYEVNNRPSGVSDRFSGSTSGNTASLTISGLQANDEADYYCSSYSSSSTWVFGGGTKLTVL

SEQ ID NO: 144 - protein, 124 aa, Homo sapiens
QVQLQESGPGLVKPSETLSLTCTVSGGSISSYYWSWIRQPAGKGLEWIGRIFASGSTNYNPSLRSRVTMSRDTSKNQFSLKLSSVTAADTAVYYCAKERVGVQDYYHYSGMDVWGQGTTVTVSS

SEQ ID NO: 145 - protein, 110 aa, Homo sapiens
QSALTQPASVSGSPGQSITISCTGTSSDVGLYNYVSWYQQQPGKAPKLMIYEVSKRPSGVSNRFSGSTSGNTASLTISGLQADDEADYSCSSYTSSSTWVFGGGTKLTVL

SEQ ID NO: 146 - protein, 124 aa, Homo sapiens
QVQLQESGPGLVKPSETLSLTCTVSGGSISSYIWSWIRQPAGKGLEWIGRIYASGNTNYNPSLKSRVTISVDTSKNQFSLKLSSMTAADTAVYYCARDYRVAGTYYYYYGLDVWGQGTTVTVSS

SEQ ID NO: 147 - protein, 124 aa, Homo sapiens
QVQLQESGPGLVKPSETLSLTCTVSGGSISSYIWSWIRQPAGKGLEWIGRIYASGNTNYNPSLKSRVTMSVDTSKNQFSLKLSSMTAADTAVYYCARDYRVAGTYYYYYGLDVWGQGTTVTVSS

SEQ ID NO: 148 - protein, 124 aa, Homo sapiens
QVQLQESGPGLVKPSETLSLTCTVSGGSISSYIWSWIRQPAGKGLEWIGRIYASGNTNYNPSLKSRVTMSVDTSKNQFSLKLSSVTAADTAVYYCARDYRVAGTYYYYYGLDVWGQGTTVTVSS

SEQ ID NO: 149 - protein, 124 aa, Homo sapiens
QVQLQESGPGLVKPSETLSLTCTVSGGSISSYIWSWIRQPAGKGLEWIGRIYASGQTNYNPSLKSRVTMSVDTSKNQFSLKLSSMTAADTAVYYCARDYRVAGTYYYYYGLDVWGQGTTVTVSS

SEQ ID NO: 150 - protein, 124 aa, Homo sapiens
QVQLQESGPGLVKPSETLSLTCTVSGGSISSYIWSWIRQPAGKGLEWIGRIYASGQTNYNPSLKSRVTISVDTSKNQFSLKLSSVTAADTAVYYCARDYRVAGTYYYYYGLDVWGQGTTVTVSS

SEQ ID NO: 151 - protein, 124 aa, Homo sapiens
QVQLQESGPGLVKPSETLSLTCTVSGGSISSYIWSWIRQPAGKGLEWIGRIYASGNTNYNPSLKSRVTISVDTSKNQFSLKLSSVTAADTAVYYCARDYRVAGTYYYYYGLDVWGQGTTVTVSS

SEQ ID NO: 152 - protein, 124 aa, Homo sapiens
QVQLQESGPGLVKPSETLSLTCTVSGGSISSYIWSWIRQPAGKGLEWIGRIYASGQTNYNPSLKSRVTISVDTSKNQFSLKLSSMTAADTAVYYCARDYRVAGTYYYYYGLDVWGQGTTVTVSS

SEQ ID NO: 153 - protein, 124 aa, Homo sapiens
QVQLQESGPGLVKPSETLSLTCTVSGGSISSYIWSWIRQPAGKGLEWIGRIYASGQTNYNPSLKSRVTMSVDTSKNQFSLKLSSVTAADTAVYYCARDYRVAGTYYYYYGLDVWGQGTTVTVSS

SEQ ID NO: 154 - protein, 110 aa, Homo sapiens
QSALTQPASVSGSPGQSITISCTGTSSDVGVYDYVSWYQQHPGKAPKLMIYEVSNRPSGVSNRFSGSKSGNTASLTISGLQTEDEADYYCSSYTSRSTWVFGGGTKLTVL

SEQ ID NO: 155-483 - skipped (329 entries)

SEQ ID NO: 484 - protein, 5 aa, Homo sapiens
DTYMH

SEQ ID NO: 485 - protein, 5 aa, Homo sapiens
PASGH

SEQ ID NO: 486 - protein, 6 aa, Homo sapiens
SGGLPD

SEQ ID NO: 487 - protein, 9 aa, Homo sapiens
ASSSVSYMY

SEQ ID NO: 488 - protein, 7 aa, Homo sapiens
ATSNLAS

SEQ ID NO: 489 - protein, 5 aa, Homo sapiens
GNPRT

SEQ ID NO: 490 - protein, 106 aa, Homo sapiens
EIVLTQSPGTLSLSPGERATLSCRASSSVSYMYWYQQKPGQAPRLLIYATSNLASGIPDRFSGSGSGTDFTLTISRLEPEDFAVYYCQQWSGNPRTFGGGTKLEIK

SEQ ID NO: 491 - protein, 116 aa, Homo sapiens
QVQLVQSGAEVKKPGASVKVSCKASGFDIQDTYMHWVRQAPGQGLEWMGRIDPASGHTKYDPKFQVRVTMTRDTSTSTVYMELSSLRSEDTAVYYCARSGGLPDVWGQGTTVTVSS

SEQ ID NO: 492 - protein, 106 aa, Homo sapiens
EIVLTQSPGTLSLSPGERATLSCRASSSVSYMYWYQQKPGQAPRLLIYATSNLASGIPDRFSGSGSGTDFTLTISRLEPEDFAVYYCQQWEGNPRTFGGGTKLEIK

SEQ ID NO: 493 - protein, 116 aa, Homo sapiens
QVQLVQSGAEVKKPGASVKVSCKASGFDIQDTYMHWVRQAPGQGLEWMGRIEPASGHIKYDPKFQGRVTMTRDTSTSTVYMELSSLRSEDTAVYYCARSGGLPDWWGQGTTVTVSS

SEQ ID NO: 494 - protein, 106 aa, Homo sapiens; identical to SEQ ID NO: 492

SEQ ID NO: 495 - protein, 116 aa, Homo sapiens
QVQLVQSGAEVKKPGASVKVSCKASGFDIQDTYMHWVRQAPGQGLEWMGRIEPASGHIKYSPKFQGRVTMTRDTSTSTVYMELSSLRSEDTAVYYCARSGGLPDWWGQGTTVTVSS

SEQ ID NO: 496 - protein, 106 aa, Homo sapiens
EIVLTQSPGTLSLSPGERATLSCGASSSVSYMYWYQQKPGQAPRLLIYATSNLASGIPDRFSGSGSGTDFTLTISRLEPEDFAVYYCQQWEGNPRTFGGGTKLEIK

SEQ ID NO: 497 - protein, 116 aa, Homo sapiens; identical to SEQ ID NO: 495

SEQ ID NO: 498 - protein, 106 aa, Homo sapiens; identical to SEQ ID NO: 492

SEQ ID NO: 499 - protein, 116 aa, Homo sapiens
QVQLVQSGAEVKKPGASVKVSCKASGFDIQDTYMHWVRQAPGQGLEWMGRIEPASGHVKYSPKFQVRVTMTRDTSTSTVYMELSSLRSEDTAVYYCARSGGLPDWWGQGTTVTVSS

SEQ ID NO: 500 - protein, 106 aa, Homo sapiens; identical to SEQ ID NO: 492

SEQ ID NO: 501 - protein, 116 aa, Homo sapiens
QVQLVQSGAEVKKPGASVKVSCKASGFDIQDTYMHWVRQAPGQGLEWMGRIEPASGHVKYDPKFQTRVTMTRDTSTSTVYMELSSLRSEDTAVYYCARSGGLPDWWGQGTTVTVSS

SEQ ID NO: 502 - protein, 106 aa, Homo sapiens
EIVLTQSPGTLSLSPGERATLSCRASSSVSYMYWYQQKPGQAPRLLIYATSNLASGIPDRFSGSGSGTDFTLTISRLEPEDFAVYYCQQWQGNPRTFGGGTKLEIK

SEQ ID NO: 503 - protein, 116 aa, Homo sapiens
QVQLVQSGAEVKKPGASVKVSCKASGFDIQDTYMHWVRQAPGQGLEWMGRIDPASGHIKYDPKFQKRVTMTRDTSTSTVYMELSSLRSEDTAVYYCARSGGLPDMWGQGTTVTVSS

SEQ ID NO: 504 - protein, 106 aa, Homo sapiens; identical to SEQ ID NO: 502

SEQ ID NO: 505 - protein, 116 aa, Homo sapiens
QVQLVQSGAEVKKPGASVKVSCKASGFDIQDTYMHWVRQAPGQGLEWMGRIDPASGHVKIDPKFQVRVTMTRDTSTSTVYMELSSLRSEDTAVYYCARSGGLPDMWGQGTTVTVSS

SEQ ID NO: 506 - protein, 106 aa, Homo sapiens; identical to SEQ ID NO: 502

SEQ ID NO: 507 - protein, 116 aa, Homo sapiens
QVQLVQSGAEVKKPGASVKVSCKASGFDIQDTYMHWVRQAPGQGLEWMGRIDPASGHLKYDPKFQVRVTMTRDTSTSTVYMELSSLRSEDTAVYYCARSGGLPDMWGQGTTVTVSS

SEQ ID NO: 508 - protein, 106 aa, Homo sapiens; identical to SEQ ID NO: 502

SEQ ID NO: 509 - protein, 116 aa, Homo sapiens
QVQLVQSGAEVKKPGASVKVSCKASGFDIQDTYMHWVRQAPGQGLEWMGRIDPASGHLKYDPKFQRRVTMTRDTSTSTVYMELSSLRSEDTAVYYCARSGGLPDMWGQGTTVTVSS

SEQ ID NO: 510 - protein, 106 aa, Homo sapiens; identical to SEQ ID NO: 492

SEQ ID NO: 511 - protein, 116 aa, Homo sapiens
QVQLVQSGAEVKKPGASVKVSCKASGFDIQDTYMHWVRQAPGQGLEWMGRIDPASGHLKYDPKFQNRVTMTRDTSTSTVYMELSSLRSEDTAVYYCARSGGLPDKWGQGTTVTVSS

SEQ ID NO: 512 - protein, 106 aa, Homo sapiens; identical to SEQ ID NO: 496

SEQ ID NO: 513 - protein, 116 aa, Homo sapiens; identical to SEQ ID NO: 511

SEQ ID NO: 514 - protein, 106 aa, Homo sapiens; identical to SEQ ID NO: 492

SEQ ID NO: 515 - protein, 116 aa, Homo sapiens
QVQLVQSGAEVKKPGASVKVSCKASGFDIQDTYMHWVRQAPGQGLEWMGRIEPASGHLKYDPKFQERVTMTRDTSTSTVYMELSSLRSEDTAVYYCARSGGLPDKWGQGTTVTVSS

SEQ ID NO: 516 - protein, 106 aa, Homo sapiens; identical to SEQ ID NO: 496

SEQ ID NO: 517 - protein, 116 aa, Homo sapiens; identical to SEQ ID NO: 515

SEQ ID NO: 518 - protein, 106 aa, Homo sapiens; identical to SEQ ID NO: 502

SEQ ID NO: 519 - protein, 116 aa, Homo sapiens
QVQLVQSGAEVKKPGASVKVSCKASGFDIQDTYMHWVRQAPGQGLEWMGRIDPASGHLKYDPKFQGRVTITRDTSASTAYMELSSLRSEDTAVYYCARSGGLPDMWGQGTTVTVSS

SEQ ID NO: 520 - protein, 106 aa, Homo sapiens; identical to SEQ ID NO: 502

SEQ ID NO: 521 - protein, 116 aa, Homo sapiens
QVQLVQSGAEVKKPGASVKVSCKASGFDIQDTYMHWVRQAPGQGLEWMGRIDPASGHLKYDPKFQGRVTITRDTSASTVYMELSSLRSEDTAVYYCARSGGLPDMWGQGTTVTVSS

SEQ ID NO: 522 - protein, 106 aa, Homo sapiens; identical to SEQ ID NO: 490

SEQ ID NO: 523 - protein, 116 aa, Homo sapiens
QVQLVQSGAEVKKPGASVKVSCKASGFDIQDTYMHWVRQAPGQGLEWMGRIDPASGHTKYDPKFQGRATITTDTSASTAYLQLSSLRSEDTAVYYCARSGGLPDVWGQGTTVTVSS

SEQ ID NO: 524 - protein, 106 aa, Homo sapiens; identical to SEQ ID NO: 490

SEQ ID NO: 525 - protein, 116 aa, Homo sapiens
QVQLVQSGAEVKKPGASVKVSCKASGFDIQDTYMHWVRQAPGQGLEWMGRIDPASGHTKYDPKFQVRATITTDTSASTAYLQLSSLRSEDTAVYYCARSGGLPDFWGQGTTVTVSS

SEQ ID NO: 526 - protein, 106 aa, Homo sapiens; identical to SEQ ID NO: 490

SEQ ID NO: 527 - protein, 116 aa, Homo sapiens
QVQLVQSGAEVKKPGASVKVSCKASGFDIQDTYMHWVRQAPGQGLEWMGRIDPASGHTKYDPKFQGRATITTDTSASTAYLQLSSLRSEDTAVYYCARSGGLPDFWGQGTTVTVSS

SEQ ID NO: 528 - protein, 106 aa, Homo sapiens; identical to SEQ ID NO: 490

SEQ ID NO: 529 - protein, 116 aa, Homo sapiens
QVQLVQSGAEVKKPGASVKVSCKASGFDIQDTYMHWVRQAPGQGLEWMGRIDPASGHTKYDPKFQGRATITTDTSASTAYLQLSSLRSEDTAVYYCARSGGLPDLWGQGTTVTVSS

SEQ ID NO: 530 - protein, 106 aa, Homo sapiens
EIVLTQSPGTLSLSPGERATLSCRASSSVSYMYWYQQKPGQAPRLLIYATSNLASGIPDRFSGSGSGTDFTLTISRLEPEDFAVYYCSQWSGNPRTFGGGTKLEIK

SEQ ID NO: 531 - protein, 116 aa, Homo sapiens; identical to SEQ ID NO: 527

SEQ ID NO: 532 - protein, 106 aa, Homo sapiens
EIVLTQSPGTLSLSPGERATLSCRASSSVSYMYWYQQKPGQAPRLLIYATSNLASGIPDRFSGSGSGTDFTLTISRLEPEDFAVYYCQQWSGNPRSFGGGTKLEIK

SEQ ID NO: 533 - protein, 116 aa, Homo sapiens; identical to SEQ ID NO: 527

SEQ ID NO: 534 - protein, 106 aa, Homo sapiens
EIVLTQSPGTLSLSPGERATLSCRASSSVSYMYWYQQKPGQAPRLLIYATSNLASGIPDRFSGSGSGTDFTLTISRLEPEDFAVYYCQQWSRNPRTFGGGTKLEIK

SEQ ID NO: 535 - protein, 116 aa, Homo sapiens; identical to SEQ ID NO: 527

SEQ ID NO: 536 - protein, 106 aa, Homo sapiens
EIVLTQSPGTLSLSPGERATLSCRASSSVSYMYWYQQKPGQAPRLLIYATSNLASGIPDRFSGSGSGTDFTLTISRLEPEDFAVYYCQQWKGNPRTFGGGTKLEIK

SEQ ID NO: 537 - protein, 116 aa, Homo sapiens; identical to SEQ ID NO: 527

SEQ ID NO: 538 - protein, 106 aa, Homo sapiens; identical to SEQ ID NO: 490

SEQ ID NO: 539 - protein, 116 aa, Homo sapiens
QVQLVQSGAEVKKPGASVKVSCKASGFDIQDTYMHWVRQAPGQGLEWMGRIDPASGHSKYDPKFQVRATITTDTSASTAYLQLSSLRSEDTAVYYCARSGGLPDFWGQGTTVTVSS

SEQ ID NO: 540 - protein, 106 aa, Homo sapiens; identical to SEQ ID NO: 490

SEQ ID NO: 541 - protein, 116 aa, Homo sapiens
QVQLVQSGAEVKKPGASVKVSCKASGFDIQDTYMHWVRQAPGQGLEWMGRIDPASGHYKYDPKFQVRATITTDTSASTAYLQLSSLRSEDTAVYYCARSGGLPDFWGQGTTVTVSS

SEQ ID NO: 542 - protein, 330 aa, Homo sapiens
ASTKGPSVFPLAPSSKSTSGGTAALGCLVKDYFPEPVTVSWNSGALTSGVHTFPAVLQSSGLYSLSSVVTVPSSSLGTQTYICNVNHKPSNTKVDKKVEPKSCDKTHTCPPCPAPEAAGAPSVFLFPPKPKDTLMISRTPEVTCVVVDVSHEDPEVKFNWYVDGVEVHNAKTKPREEQYNSTYRVVSVLTVLHQDWLNGKEYKCKVSNKALPAPIEKTISKAKGQPREPQVYTLPPSRDELTKNQVSLTCLVKGFYPSDIAVEWESNGQPENNYKTTPPVLDSDGSFFLYSKLTVDKSRWQQGNVFSCSVMHEALHNHYTQKSLSLSPGK

SEQ ID NO: 543 - protein, 326 aa, Homo sapiens
ASTKGPSVFPLAPCSRSTSESTAALGCLVKDYFPEPVTVSWNSGALTSGVHTFPAVLQSSGLYSLSSVVTVPSSNFGTQTYTCNVDHKPSNTKVDKTVERKCCVECPPCPAPPVAGPSVFLFPPKPKDTLMISRTPEVTCVVVDVSHEDPEVQFNWYVDGVEVHNAKTKPREEQFNSTFRVVSVLTVVHQDWLNGKEYKCKVSNKGLPAPIEKTISKTKGQPREPQVYTLPPSREEMTKNQVSLTCLVKGFYPSDIAVEWESNGQPENNYKTTPPMLDSDGSFFLYSKLTVDKSRWQQGNVFSCSVMHEALHNHYTQKSLSLSPGK

SEQ ID NO: 544 - protein, 107 aa, Homo sapiens [sequence omitted]

SEQ ID NO: 545 - protein, 25 aa, Homo sapiens [sequence omitted]

SEQ ID NO: 546 - protein, 14 aa, Homo sapiens
WVRQAPGQGLEWMG

SEQ ID NO: 547 - protein, 30 aa, Homo sapiens
RVTMTRDTSTSTVYMELSSLRSEDTAVYYC

SEQ ID NO: 548 - protein, 11 aa, Homo sapiens
WGQGTTVTVSS

SEQ ID NO: 549 - protein, 23 aa, Homo sapiens
EIVLTQSPGTLSLSPGERATLSC

SEQ ID NO: 550 - protein, 15 aa, Homo sapiens
WYQQKPGQAPRLLIY

SEQ ID NO: 551 - protein, 32 aa, Homo sapiens
GIPDRFSGSGSGTDFTLTISRLEPEDFAVYYC

SEQ ID NO: 552 - protein, 10 aa, Homo sapiens
FGGGTKLEIK

SEQ ID NO: 553 - protein, 10 aa, Homo sapiens
GFDIQDTYMH

SEQ ID NO: 554 - protein, 17 aa, Homo sapiens
RIDPASGHTKYDPKFQV

SEQ ID NO: 555 - protein, 17 aa, Homo sapiens
RIEPASGHIKYDPKFQG

SEQ ID NO: 556 - protein, 17 aa, Homo sapiens
RIEPASGHIKYSPKFQG

SEQ ID NO: 557 - protein, 17 aa, Homo sapiens
RIEPASGHVKYSPKFQV

SEQ ID NO: 558 - protein, 17 aa, Homo sapiens
RIEPASGHVKYDPKFQT

SEQ ID NO: 559 - protein, 17 aa, Homo sapiens
RIDPASGHIKYDPKFQK

SEQ ID NO: 560 - protein, 17 aa, Homo sapiens
RIDPASGHVKIDPKFQV

SEQ ID NO: 561 - protein, 17 aa, Homo sapiens
RIDPASGHLKYDPKFQV

SEQ ID NO: 562 - protein, 17 aa, Homo sapiens
RIDPASGHLKYDPKFQR

SEQ ID NO: 563 - protein, 17 aa, Homo sapiens
RIDPASGHLKYDPKFQN

SEQ ID NO: 564 - protein, 17 aa, Homo sapiens
RIEPASGHLKYDPKFQE

SEQ ID NO: 565 - protein, 9 aa, Homo sapiens
ARSGGLPDV

SEQ ID NO: 566 - protein, 9 aa, Homo sapiens
ARSGGLPDW

SEQ ID NO: 567 - protein, 9 aa, Homo sapiens
ARSGGLPDM

SEQ ID NO: 568 - protein, 9 aa, Homo sapiens
ARSGGLPDK

SEQ ID NO: 569 - protein, 10 aa, Homo sapiens
RASSSVSYMY

SEQ ID NO: 570 - protein, 10 aa, Homo sapiens
GASSSVSYMY

SEQ ID NO: 571 - protein, 9 aa, Homo sapiens
QQWSGNPRT

SEQ ID NO: 572 - protein, 9 aa, Homo sapiens
QQWEGNPRT

SEQ ID NO: 573 - protein, 9 aa, Homo sapiens
QQWQGNPRT

SEQ ID NO: 574 - protein, 17 aa, Homo sapiens
RIDPASGHLKYDPKFQG

SEQ ID NO: 575 - protein, 17 aa, Homo sapiens
RIDPASGHTKYDPKFQG

SEQ ID NO: 576 - protein, 17 aa, Homo sapiens
RIDPASGHSKYDPKFQV

SEQ ID NO: 577 - protein, 17 aa, Homo sapiens
RIDPASGHYKYDPKFQV

SEQ ID NO: 578 - protein, 9 aa, Homo sapiens
ARSGGLPDV

SEQ ID NO: 579 - protein, 9 aa, Homo sapiens
ARSGGLPDM

SEQ ID NO: 580 - protein, 9 aa, Homo sapiens
ARSGGLPDF

SEQ ID NO: 581 - protein, 9 aa, Homo sapiens
ARSGGLPDL

SEQ ID NO: 582 - protein, 9 aa, Homo sapiens
SQWSGNPRT

SEQ ID NO: 583 - protein, 9 aa, Homo sapiens
QQWSGNPRS

SEQ ID NO: 584 - protein, 9 aa, Homo sapiens
QQWSRNPRT

SEQ ID NO: 585 - protein, 9 aa, Homo sapiens
QQWKGNPRT

SEQ ID NO: 586 - protein, 30 aa, Homo sapiens
RATITTDTSASTAYLQLSSLRSEDTAVYYC

SEQ ID NO: 587 - protein, 30 aa, Homo sapiens
RVTITRDTSASTVYMELSSLRSEDTAVYYC

SEQ ID NO: 588 - protein, 30 aa, Homo sapiens
RVTITRDTSASTAYMELSSLRSEDTAVYYC

SEQ ID NO: 589-1000 - skipped (412 entries)

SEQ ID NO: 1001 - DNA, 348 bp, Homo sapiens
  source 1..348: mol_type = other DNA
gaagttcagctgcaacagtctggcgccgagctggttaagcctggcgcttctgtgaagctgagctgtaccgcctctggcttcgacatccaagacacctacatgcactgggtcaagcagaggcctgagcagggactcgagtggatcggcagaattgatcctgccagcggccacaccaaatacgaccccaagttccaagtgaaggccaccatcaccaccgacaccagcagcaataccgcctacctgcagctgagcagcctgacctctgaagataccgccgtgtactactgcagcagatctggcggactgcccgatgtttggggagccggaacaaccgtgacagtgtccagc

SEQ ID NO: 1002 - DNA, 348 bp, Homo sapiens
  source 1..348: mol_type = other DNA
gaggttcaacttcaacaatcgggggccgagctggttaagcccggcgcttctgtaaaattgtcttgcactgcctctgggtttgacatccaagatacatatatgcattgggtgaaacagcgtcccgagcagggcttggagtggattggacgtattgaccccgcctctgggcacacgaaatatgatcctaagttccaggttaaagcgactatcacaacggacacctccagcaatacggcttatttacagttatcctcgctgacctctgaggatactgcagtgtactactgctctcgctctggtggtctgccagacgtgtggggtgcaggaactacagttactgtgtcttca

SEQ ID NO: 1003 - protein, 116 aa, Homo sapiens
EVQLQQSGAELVKPGASVKLSCTASGFDIQDTYMHWVKQRPEQGLEWIGRIDPASGHTKYDPKFQVKATITTDTSSNTAYLQLSSLTSEDTAVYYCSRSGGLPDVWGAGTTVTVSS

SEQ ID NO: 1004 - DNA, 318 bp, Homo sapiens
  source 1..318: mol_type = other DNA
caaattgtgctgtctcagagccccgccatcctgagtgcttctccaggcgagaaagtgaccatgacctgcagagccagcagcagcgtgtcctacatgtactggtatcagcagaagcccggcagcagccccaagccttggatctacgccacaagcaatctggccagcggcgtgcccgatagattttctggctctggcagcggcaccagctacagcctgacaatctctagagtggaagccgaggatgccgccacctactactgtcaacagtggagcggcaaccccagaacctttggcggaggcaccaagctggaaatcaag

SEQ ID NO: 1005 - DNA, 318 bp, Homo sapiens
  source 1..318: mol_type = other DNA
caaatcgtcctgtcacagtccccggcgatcctttctgcttcaccaggagagaaggtaaccatgacatgtcgcgcctcttcctcagtttcttacatgtactggtaccagcagaaaccaggatcatctcccaaaccctggatctacgctacatcaaaccttgcatctggcgtgccagaccgtttttcagggtcgggctcggggacttcctattcattaaccatttctcgcgtagaagcggaagacgccgccacgtattattgtcagcagtggtcaggaaatccgcgcacattcggaggcggaacgaaattggagatcaaa

SEQ ID NO: 1006 - protein, 106 aa, Homo sapiens
QIVLSQSPAILSASPGEKVTMTCRASSSVSYMYWYQQKPGSSPKPWIYATSNLASGVPDRFSGSGSGTSYSLTISRVEAEDAATYYCQQWSGNPRTFGGGTKLEIK

SEQ ID NO: 1007 - DNA, 30 bp, Homo sapiens
  source 1..30: mol_type = other DNA
ggcttcgacatccaagacacctacatgcac

SEQ ID NO: 1008 - DNA, 30 bp, Homo sapiens
  source 1..30: mol_type = other DNA
gggtttgacatccaagatacatatatgcat

SEQ ID NO: 1009 - protein, 10 aa, Homo sapiens
GFDIQDTYMH

SEQ ID NO: 1010-10009 - skipped (9000 entries)

SEQ ID NO: 10010 - DNA, 51 bp, Homo sapiens
  source 1..51: mol_type = other DNA
agaattgatcctgccagcggccacaccaaatacgaccccaagttccaagtg

SEQ ID NO: 10011 - DNA, 51 bp, Homo sapiens
  source 1..51: mol_type = other DNA
cgtattgaccccgcctctgggcacacgaaatatgatcctaagttccaggtt

SEQ ID NO: 10012 - protein, 17 aa, Homo sapiens
RIDPASGHTKYDPKFQV

SEQ ID NO: 10013 - DNA, 21 bp, Homo sapiens
  source 1..21: mol_type = other DNA
tctggcggactgcccgatgtt

SEQ ID NO: 10014 - DNA, 21 bp, Homo sapiens
  source 1..21: mol_type = other DNA
tctggtggtctgccagacgtg

SEQ ID NO: 10015 - protein, 7 aa, Homo sapiens
SGGLPDV

SEQ ID NO: 10016 - DNA, 30 bp, Homo sapiens
  source 1..30: mol_type = other DNA
agagccagcagcagcgtgtcctacatgtac

SEQ ID NO: 10017 - DNA, 30 bp, Homo sapiens
  source 1..30: mol_type = other DNA
cgcgcctcttcctcagtttcttacatgtac

SEQ ID NO: 10018 - protein, 10 aa, Homo sapiens
RASSSVSYMY

SEQ ID NO: 10019 - DNA, 21 bp, Homo sapiens
  source 1..21: mol_type = other DNA
gccacaagcaatctggccagc

SEQ ID NO: 10020 - DNA, 21 bp, Homo sapiens
  source 1..21: mol_type = other DNA
gctacatcaaaccttgcatct

SEQ ID NO: 10021 - protein, 7 aa, Homo sapiens
ATSNLAS

SEQ ID NO: 10022 - DNA, 27 bp, Homo sapiens
  source 1..27: mol_type = other DNA
caacagtggagcggcaaccccagaacc

SEQ ID NO: 10023 - DNA, 27 bp, Homo sapiens
  source 1..27: mol_type = other DNA
cagcagtggtcaggaaatccgcgcaca

SEQ ID NO: 10024 - protein, 9 aa, Homo sapiens
QQWSGNPRT

SEQ ID NO: 10025 - DNA, 348 bp, Homo sapiens
  source 1..348: mol_type = other DNA
caagtacaattagtccagtcgggtgccgaggtaaaaaaacctggagcatccgtaaaactgtcttgcaaagcatcggggtttgacatccaggacacctacatgcactgggtgcgtcaagctccaggacagggattagagtggatgggtcgcatcgaccccgcgagcggacacacgaaatacgaccctaaatttcaagtacgtgtcacgatgactaccgacactagtacgagcactgtttatatggaattgtcctcgttacgctcagaggatacggcagtctattattgcagccgttccggaggcttacccgacgtctggggacagggaactactgtaacagtcagtagt

SEQ ID NO: 10026 - protein, 116 aa, Homo sapiens
QVQLVQSGAEVKKPGASVKLSCKASGFDIQDTYMHWVRQAPGQGLEWMGRIDPASGHTKYDPKFQVRVTMTTDTSTSTVYMELSSLRSEDTAVYYCSRSGGLPDVWGQGTTVTVSS

SEQ ID NO: 10027 - DNA, 318 bp, Homo sapiens
  source 1..318: mol_type = other DNA
gagattgtgttaacgcaatcaccggggactttatcgctgtcgccgggggagcgcgttacaatgtcttgtcgcgcttcctcttcggtttcatacatgtattggtatcaacaaaaaccgggacaggctccacgcccctggatttacgctactagcaatttggcctcgggcgttcccgaccgcttcagcgggtcagggagcggcaccgattacacgttgaccatctctcgtctggaacctgaagacttcgcggtctattactgtcaacaatggtcgggaaatccccgtacatttggcggagggacgaagttggaaattaaa

SEQ ID NO: 10028 - protein, 106 aa, Homo sapiens
EIVLTQSPGTLSLSPGERVTMSCRASSSVSYMYWYQQKPGQAPRPWIYATSNLASGVPDRFSGSGSGTDYTLTISRLEPEDFAVYYCQQWSGNPRTFGGGTKLEIK

SEQ ID NO: 10029 - DNA, 30 bp, Homo sapiens
  source 1..30: mol_type = other DNA
gggtttgacatccaggacacctacatgcac

SEQ ID NO: 10030 - DNA, 51 bp, Homo sapiens
  source 1..51: mol_type = other DNA
cgcatcgaccccgcgagcggacacacgaaatacgaccctaaatttcaagta

SEQ ID NO: 10031 - DNA, 21 bp, Homo sapiens
  source 1..21: mol_type = other DNA
tccggaggcttacccgacgtc

SEQ ID NO: 10032 - DNA, 36 bp, Homo sapiens
  source 1..36: mol_type = other DNA
cgcgcttcctcttcggtttcatacatgtattggtat

SEQ ID NO: 10033 - DNA, 21 bp, Homo sapiens
  source 1..21: mol_type = other DNA
gctactagcaatttggcctcg

SEQ ID NO: 10034 - DNA, 27 bp, Homo sapiens
  source 1..27: mol_type = other DNA
caacaatggtcgggaaatccccgtaca

SEQ ID NO: 10035 - DNA, 348 bp, Homo sapiens
  source 1..348: mol_type = other DNA
caagtacaattagtccagtcgggtgccgaggtaaaaaaacctggagcatccgtaaaactgtcttgcaaagcatcggggtttgacatccaggacacctacatgcactgggtgcgtcaagctccaggacagggattagagtggatgggtcgcatcgaccccgcgagcggacacacgaaatacgaccctaaatttcaagtacgtgtcacgatgactcgtgacactagtacgagcactgtttatatggaattgtcctcgttacgctcagaggatacggcagtctattattgcagccgttccggaggcttacccgacgtctggggacagggaactactgtaacagtcagtagt

SEQ ID NO: 10036 - protein, 116 aa, Homo sapiens
QVQLVQSGAEVKKPGASVKLSCKASGFDIQDTYMHWVRQAPGQGLEWMGRIDPASGHTKYDPKFQVRVTMTRDTSTSTVYMELSSLRSEDTAVYYCSRSGGLPDVWGQGTTVTVSS

SEQ ID NO: 10037 - DNA, 318 bp, Homo sapiens
  source 1..318: mol_type = other DNA
gagattgtgttaacgcaatcaccggggactttatcgctgtcgccgggggagcgcgcgacactgtcttgtcgcgcttcctcttcggtttcatacatgtattggtatcaacaaaaaccgggacaggctccacgcctgctgatttacgctactagcaatttggcctcgggcatccccgaccgcttcagcgggtcagggagcggcaccgattttacgttgaccatctctcgtctggaacctgaagacttcgcggtctattactgtcaacaatggtcgggaaatccccgtacatttggcggagggacgaagttggaaattaaa

SEQ ID NO: 10038 - protein, 106 aa, Homo sapiens; identical to SEQ ID NO: 490

SEQ ID NO: 10039 - DNA, 348 bp, Homo sapiens
  source 1..348: mol_type = other DNA
caagtacaattagtccagtcgggtgccgaggtaaaaaaacctggagcatccgtaaaagtctcttgcaaagcatcggggtttgacatccaggacacctacatgcactgggtgcgtcaagctccaggacagggattagagtggatgggtcgcatcgaccccgcgagcggacacacgaaatacgaccctaaatttcaagtacgtgtcacgatgactcgtgacactagtacgagcactgtttatatggaattgtcctcgttacgctcagaggatacggcagtctattattgcgcacgttccggaggcttacccgacgtctggggacagggaactactgtaacagtcagtagt

SEQ ID NO: 10040 - protein, 116 aa, Homo sapiens; identical to SEQ ID NO: 491

SEQ ID NO: 10041 - DNA, 318 bp, Homo sapiens
  source 1..318: mol_type = other DNA
gagattgtgttaacgcaatcaccggggactttatcgctgtcgccgggggagcgcgcgacactgtcttgtcgcgcttcctcttcggtttcatacatgtattggtatcaacaaaaaccgggacaggctccacgcctgctgatttacgctactagcaatttggcctcgggcgttcccgaccgcttcagcgggtcagggagcggcaccgattacacgttgaccatctctcgtctggaacctgaagacttcgcggtctattactgtcaacaatggtcgggaaatccccgtacatttggcggagggacgaagttggaaattaaa

SEQ ID NO: 10042 - protein, 106 aa, Homo sapiens
EIVLTQSPGTLSLSPGERATLSCRASSSVSYMYWYQQKPGQAPRLLIYATSNLASGVPDRFSGSGSGTDYTLTISRLEPEDFAVYYCQQWSGNPRTFGGGTKLEIK

SEQ ID NO: 10043 - protein, 116 aa, Homo sapiens
QVQLVQSGAEVKKPGASVKVSCKASGFDIQDTYMHWVRQAPGQGLEWMGRIDPASGHTKYDPKFQVRVTMTRDTSTSTVYMELSSLRSEDTAVYYCARSGGLPDKWGQGTTVTVSS

SEQ ID NO: 10044 - protein, 116 aa, Homo sapiens
QVQLVQSGAEVKKPGASVKVSCKASGFDIQDTYMHWVRQAPGQGLEWMGRIDPASGHTKYDPKFQVRVTMTRDTSTSTVYMELSSLRSEDTAVYYCARSGGLPDMWGQGTTVTVSS

SEQ ID NO: 10045 - protein, 116 aa, Homo sapiens
QVQLVQSGAEVKKPGASVKVSCKASGFDIQDTYMHWVRQAPGQGLEWMGRIDPASGHTKYDPKFQVRVTMTRDTSTSTVYMELSSLRSEDTAVYYCARSGGLPDQWGQGTTVTVSS

SEQ ID NO: 10046 - protein, 116 aa, Homo sapiens
QVQLVQSGAEVKKPGASVKVSCKASGFDIQDTYMHWVRQAPGQGLEWMGRIDPASGHTKYDPKFQVRVTMTRDTSTSTVYMELSSLRSEDTAVYYCARSGGLPDWWGQGTTVTVSS

SEQ ID NO: 10047 - protein, 106 aa, Homo sapiens
EIVLTQSPGTLSLSPGERATLSCRASSSVSYMYWYQQKPGQAPRLLIYATSNLASGIPDRFSGSGSGTDFTLTISRLEPEDFAVYYCQQWDGNPRTFGGGTKLEIK

SEQ ID NO: 10048 - protein, 106 aa, Homo sapiens; identical to SEQ ID NO: 492

SEQ ID NO: 10049 - protein, 106 aa, Homo sapiens
EIVLTQSPGTLSLSPGERATLSCRASSSVSYMYWYQQKPGQAPRLLIYATSNLASGIPDRFSGSGSGTDFTLTISRLEPEDFAVYYCQQWHGNPRTFGGGTKLEIK

SEQ ID NO: 10050 - protein, 106 aa, Homo sapiens
EIVLTQSPGTLSLSPGERATLSCRASSSVSYMYWYQQKPGQAPRLLIYATSNLASGIPDRFSGSGSGTDFTLTISRLEPEDFAVYYCQQWNGNPRTFGGGTKLEIK

SEQ ID NO: 10051 - protein, 106 aa, Homo sapiens; identical to SEQ ID NO: 502

SEQ ID NO: 10052 - protein, 116 aa, Homo sapiens
  VARIANT 28: note = D or E
  VARIANT 29: note = I, P, or V
  VARIANT 30: note = G, Q, S or V
  VARIANT 33: note = F or Y
  VARIANT 34: note = I or M
  VARIANT 102: note = L or M
  VARIANT 105: note = E, I, K, L, M, Q, T, V, W, Y
QVQLVQSGAEVKKPGASVKVSCKASGFXXXDTXXHWVRQAPGQGLEWMGRIDPASGHTKYDPKFQVRVTMTRDTSTSTVYMELSSLRSEDTAVYYCARSGGXPDXWGQGTTVTVSS

SEQ ID NO: 10053 - protein, 106 aa, Homo sapiens
  VARIANT 88: note = Q or N
  VARIANT 91: note = D,E,H,N,Q, or S
  VARIANT 92: note = Q or G
  VARIANT 93: note = D, F, K, N, R, S, or T
EIVLTQSPGTLSLSPGERATLSCRASSSVSYMYWYQQKPGQAPRLLIYATSNLASGIPDRFSGSGSGTDFTLTISRLEPEDFAVYYCXQWXXXPRTFGGGTKLEIK

SEQ ID NO: 10054 - protein, 116 aa, Homo sapiens
  VARIANT 28: note = D or E
  VARIANT 29: note = I, P or V
  VARIANT 30: note = G, Q, S or V
  VARIANT 33: note = F or Y
  VARIANT 34: note = I or M
  VARIANT 102: note = L or M
  VARIANT 105: note = E, I,K,L,M,Q,T,V,W or Y
QVQLVQSGAEVKKPGASVKVSCKASGFXXXDTXXHWVRQAPGQGLEWMGRIDPASGHTKYDPKFQVRVTMTRDTSTSTVYMELSSLRSEDTAVYYCSRSGGXPDXWGQGTTVTVSS

SEQ ID NO: 10055-100099 - skipped (90045 entries)

SEQ ID NO: 100100 - protein, 25 aa, Homo sapiens
QVQLVQSGAEVKKPGASVKLSCKAS

SEQ ID NO: 100101 - protein, 14 aa, Homo sapiens
WVRQAPGQGLEWMG

SEQ ID NO: 100102 - protein, 32 aa, Homo sapiens
RVTMTRDTSTSTVYMELSSLRSEDTAVYYCSR

SEQ ID NO: 100103 - protein, 11 aa, Homo sapiens
WGQGTTVTVSS

SEQ ID NO: 100104 - protein, 23 aa, Homo sapiens
EIVLTQSPGTLSLSPGERATLSC

SEQ ID NO: 100105 - protein, 15 aa, Homo sapiens
WYQQKPGQAPRLLIY

SEQ ID NO: 100106 - protein, 32 aa, Homo sapiens; identical to SEQ ID NO: 551

SEQ ID NO: 100107 - protein, 10 aa, Homo sapiens
FGGGTKLEIK

SEQ ID NO: 100108 - protein, 25 aa, Homo sapiens [sequence omitted]

SEQ ID NO: 100109 - protein, 32 aa, Homo sapiens
RVTMTRDTSTSTVYMELSSLRSEDTAVYYCAR

SEQ ID NO: 100110 - protein, 32 aa, Homo sapiens
GVPDRFSGSGSGTDYTLTISRLEPEDFAVYYC

SEQ ID NO: 100111-100149 - skipped (39 entries)

SEQ ID NO: 100150 - protein, 10 aa, Homo sapiens
  VARIANT 3: note = D or Q
  VARIANT 4: note = I, P or V
  VARIANT 5: note = G, Q, S or V
  VARIANT 8: note = F or Y
  VARIANT 9: note = I or M
GFXXXDTXXH

SEQ ID NO: 100151 - skipped

SEQ ID NO: 100152 - protein, 7 aa, Homo sapiens
  VARIANT 4: note = L or M
  VARIANT 7: note = E, I, K, L, M, Q, T, V, W, or Y
SGGXPDX

SEQ ID NO: 100153-100154 - skipped (2 entries)

SEQ ID NO: 100155 - protein, 9 aa, Homo sapiens
  VARIANT 1: note = Q or N
  VARIANT 4: note = D, E, H, N, Q, or S
  VARIANT 5: note = A or G
  VARIANT 6: note = D, F, K, N, R, S, or T
XQWXXXPRT

SEQ ID NO: 100156-100199 - skipped (44 entries)

SEQ ID NO: 100200 - protein, 10 aa, Homo sapiens
GFDIGDTFIH

SEQ ID NO: 100201 - protein, 10 aa, Homo sapiens
GFDIGDTFMH

SEQ ID NO: 100202 - protein, 10 aa, Homo sapiens
GFDIGDTYIH

SEQ ID NO: 100203 - protein, 10 aa, Homo sapiens
GFDIGDTYMH

SEQ ID NO: 100204 - protein, 10 aa, Homo sapiens
GFDIQDTFIH

SEQ ID NO: 100205 - protein, 10 aa, Homo sapiens
GFDIQDTFMH

SEQ ID NO: 100206 - protein, 10 aa, Homo sapiens
GFDIQDTYIH

SEQ ID NO: 100207 - protein, 10 aa, Homo sapiens
GFDIQDTYMH

SEQ ID NO: 100208 - protein, 10 aa, Homo sapiens
GFDISDTFIH

SEQ ID NO: 100209 - protein, 10 aa, Homo sapiens
GFDISDTFMH

SEQ ID NO: 100210 - protein, 10 aa, Homo sapiens
GFDISDTYIH

SEQ ID NO: 100211 - protein, 10 aa, Homo sapiens
GFDISDTYMH

SEQ ID NO: 100212 - protein, 10 aa, Homo sapiens
GFDIVDTFIH

SEQ ID NO: 100213 - protein, 10 aa, Homo sapiens
GFDIVDTFMH

SEQ ID NO: 100214 - protein, 10 aa, Homo sapiens
GFDIVDTYIH

SEQ ID NO: 100215 - protein, 10 aa, Homo sapiens
GFDIVDTYMH

SEQ ID NO: 100216 - protein, 10 aa, Homo sapiens
GFDPGDTFIH

SEQ ID NO: 100217 - protein, 10 aa, Homo sapiens
GFDPGDTFMH

SEQ ID NO: 100218 - protein, 10 aa, Homo sapiens
GFDPGDTYIH

SEQ ID NO: 100219 - protein, 10 aa, Homo sapiens
GFDPGDTYMH

SEQ ID NO: 100220 - protein, 10 aa, Homo sapiens
GFDPQDTFIH

SEQ ID NO: 100221 - protein, 10 aa, Homo sapiens
GFDPQDTFMH

SEQ ID NO: 100222 - protein, 10 aa, Homo sapiens
GFDPQDTYIH

SEQ ID NO: 100223 - protein, 10 aa, Homo sapiens
GFDPQDTYMH

SEQ ID NO: 100224 - protein, 10 aa, Homo sapiens
GFDPSDTFIH

SEQ ID NO: 100225 - protein, 10 aa, Homo sapiens
GFDPSDTFMH

SEQ ID NO: 100226 - protein, 10 aa, Homo sapiens
GFDPSDTYIH

SEQ ID NO: 100227 - protein, 10 aa, Homo sapiens
GFDPSDTYMH

SEQ ID NO: 100228 - protein, 10 aa, Homo sapiens
GFDPVDTFIH

SEQ ID NO: 100229 - protein, 10 aa, Homo sapiens
GFDPVDTFMH

SEQ ID NO: 100230 - protein, 10 aa, Homo sapiens
GFDPVDTYIH

SEQ ID NO: 100231 - protein, 10 aa, Homo sapiens
GFDPVDTYMH

SEQ ID NO: 100232 - protein, 10 aa, Homo sapiens
GFDVGDTFIH

SEQ ID NO: 100233 - protein, 10 aa, Homo sapiens
GFDVGDTFMH

SEQ ID NO: 100234 - protein, 10 aa, Homo sapiens
GFDVGDTYIH

SEQ ID NO: 100235 - protein, 10 aa, Homo sapiens
GFDVGDTYMH

SEQ ID NO: 100236 - protein, 10 aa, Homo sapiens
GFDVQDTFIH

SEQ ID NO: 100237 - protein, 10 aa, Homo sapiens
GFDVQDTFMH

SEQ ID NO: 100238 - protein, 10 aa, Homo sapiens
GFDVQDTYIH

SEQ ID NO: 100239 - protein, 10 aa, Homo sapiens
GFDVQDTYMH

SEQ ID NO: 100240 - protein, 10 aa, Homo sapiens
GFDVSDTFIH

SEQ ID NO: 100241 - protein, 10 aa, Homo sapiens
GFDVSDTFMH

SEQ ID NO: 100242 - protein, 10 aa, Homo sapiens
GFDVSDTYIH

SEQ ID NO: 100243 - protein, 10 aa, Homo sapiens
GFDVSDTYMH

SEQ ID NO: 100244 - protein, 10 aa, Homo sapiens
GFDVVDTFIH

SEQ ID NO: 100245 - protein, 10 aa, Homo sapiens
GFDVVDTFMH

SEQ ID NO: 100246 - protein, 10 aa, Homo sapiens
GFDVVDTYIH

SEQ ID NO: 100247 - protein, 10 aa, Homo sapiens
GFDVVDTYMH

SEQ ID NO: 100248 - protein, 10 aa, Homo sapiens
GFEIGDTFIH

SEQ ID NO: 100249 - protein, 10 aa, Homo sapiens
GFEIGDTFMH

SEQ ID NO: 100250 - protein, 10 aa, Homo sapiens
GFEIGDTYIH

SEQ ID NO: 100251 - protein, 10 aa, Homo sapiens
GFEIGDTYMH

SEQ ID NO: 100252 - protein, 10 aa, Homo sapiens
GFEIQDTFIH

SEQ ID NO: 100253 - protein, 10 aa, Homo sapiens
GFEIQDTFMH

SEQ ID NO: 100254 - protein, 10 aa, Homo sapiens
GFEIQDTYIH

SEQ ID NO: 100255 - protein, 10 aa, Homo sapiens
GFEIQDTYMH

SEQ ID NO: 100256 - protein, 10 aa, Homo sapiens
GFEISDTFIH

SEQ ID NO: 100257 - protein, 10 aa, Homo sapiens
GFEISDTFMH

SEQ ID NO: 100258 - protein, 10 aa, Homo sapiens
GFEISDTYIH

SEQ ID NO: 100259 - protein, 10 aa, Homo sapiens
GFEISDTYMH

SEQ ID NO: 100260 - protein, 10 aa, Homo sapiens
GFEIVDTFIH

SEQ ID NO: 100261 - protein, 10 aa, Homo sapiens
GFEIVDTFMH

SEQ ID NO: 100262 - protein, 10 aa, Homo sapiens
GFEIVDTYIH

SEQ ID NO: 100263 - protein, 10 aa, Homo sapiens
GFEIVDTYMH

SEQ ID NO: 100264 - protein, 10 aa, Homo sapiens
GFEPGDTFIH

SEQ ID NO: 100265 - protein, 10 aa, Homo sapiens
GFEPGDTFMH

SEQ ID NO: 100266 - protein, 10 aa, Homo sapiens
GFEPGDTYIH

SEQ ID NO: 100267 - protein, 10 aa, Homo sapiens
GFEPGDTYMH

SEQ ID NO: 100268 - protein, 10 aa, Homo sapiens
GFEPQDTFIH

SEQ ID NO: 100269 - protein, 10 aa, Homo sapiens
GFEPQDTFMH

SEQ ID NO: 100270 - protein, 10 aa, Homo sapiens
GFEPQDTYIH

SEQ ID NO: 100271 - protein, 10 aa, Homo sapiens
GFEPQDTYMH

SEQ ID NO: 100272 - protein, 10 aa, Homo sapiens
GFEPSDTFIH

SEQ ID NO: 100273 - protein, 10 aa, Homo sapiens
GFEPSDTFMH

SEQ ID NO: 100274 - protein, 10 aa, Homo sapiens
GFEPSDTYIH

SEQ ID NO: 100275 - protein, 10 aa, Homo sapiens
GFEPSDTYMH

SEQ ID NO: 100276 - protein, 10 aa, Homo sapiens
GFEPVDTFIH

SEQ ID NO: 100277 - protein, 10 aa, Homo sapiens
GFEPVDTFMH

SEQ ID NO: 100278 - protein, 10 aa, Homo sapiens
GFEPVDTYIH

SEQ ID NO: 100279 - protein, 10 aa, Homo sapiens
GFEPVDTYMH

SEQ ID NO: 100280 - protein, 10 aa, Homo sapiens
GFEVGDTFIH

SEQ ID NO: 100281 - protein, 10 aa, Homo sapiens
GFEVGDTFMH

SEQ ID NO: 100282 - protein, 10 aa, Homo sapiens
GFEVGDTYIH

SEQ ID NO: 100283 - protein, 10 aa, Homo sapiens
GFEVGDTYMH

SEQ ID NO: 100284 - protein, 10 aa, Homo sapiens
GFEVQDTFIH

SEQ ID NO: 100285 - protein, 10 aa, Homo sapiens
GFEVQDTFMH

SEQ ID NO: 100286 - protein, 10 aa, Homo sapiens
GFEVQDTYIH

SEQ ID NO: 100287 - protein, 10 aa, Homo sapiens
GFEVQDTYMH

SEQ ID NO: 100288 - protein, 10 aa, Homo sapiens
GFEVSDTFIH

SEQ ID NO: 100289 - protein, 10 aa, Homo sapiens
GFEVSDTFMH

SEQ ID NO: 100290 - protein, 10 aa, Homo sapiens
GFEVSDTYIH

SEQ ID NO: 100291 - protein, 10 aa, Homo sapiens
GFEVSDTYMH

SEQ ID NO: 100292 - protein, 10 aa, Homo sapiens
GFEVVDTFIH

SEQ ID NO: 100293 - protein, 10 aa, Homo sapiens
GFEVVDTFMH

SEQ ID NO: 100294 - protein, 10 aa, Homo sapiens
GFEVVDTYIH

SEQ ID NO: 100295 - protein, 10 aa, Homo sapiens
GFEVVDTYMH

SEQ ID NO: 100296 - protein, 7 aa, Homo sapiens
SGGLPDE

SEQ ID NO: 100297 - protein, 7 aa, Homo sapiens
SGGLPDI

SEQ ID NO: 100298 - protein, 7 aa, Homo sapiens
SGGLPDK

SEQ ID NO: 100299 - protein, 7 aa, Homo sapiens
SGGLPDL

SEQ ID NO: 100300 - protein, 7 aa, Homo sapiens
SGGLPDM

SEQ ID NO: 100301 - protein, 7 aa, Homo sapiens
SGGLPDQ

SEQ ID NO: 100302 - protein, 7 aa, Homo sapiens
SGGLPDT

SEQ ID NO: 100303 - protein, 7 aa, Homo sapiens
SGGLPDW

SEQ ID NO: 100304 - protein, 7 aa, Homo sapiens
SGGLPDY

SEQ ID NO: 100305 - protein, 7 aa, Homo sapiens
SGGMPDE

SEQ ID NO: 100306 - protein, 7 aa, Homo sapiens
SGGMPDI

SEQ ID NO: 100307 - protein, 7 aa, Homo sapiens
SGGMPDK

SEQ ID NO: 100308 - protein, 7 aa, Homo sapiens
SGGMPDL

SEQ ID NO: 100309 - protein, 7 aa, Homo sapiens
SGGMPDM

SEQ ID NO: 100310 - protein, 7 aa, Homo sapiens
SGGMPDQ

SEQ ID NO: 100311 - protein, 7 aa, Homo sapiens
SGGMPDT

SEQ ID NO: 100312 - protein, 7 aa, Homo sapiens
SGGMPDV

SEQ ID NO: 100313 - protein, 7 aa, Homo sapiens
SGGMPDW

SEQ ID NO: 100314 - protein, 7 aa, Homo sapiens
SGGMPDY

SEQ ID NO: 100315 - protein, 9 aa, Homo sapiens
QQWDADPRT

SEQ ID NO: 100316 - protein, 9 aa, Homo sapiens
QQWDAFPRT

SEQ ID NO: 100317 - protein, 9 aa, Homo sapiens
QQWDAKPRT

SEQ ID NO: 100318 - protein, 9 aa, Homo sapiens
QQWDANPRT

SEQ ID NO: 100319 - protein, 9 aa, Homo sapiens
QQWDARPRT

SEQ ID NO: 100320 - protein, 9 aa, Homo sapiens
QQWDASPRT

SEQ ID NO: 100321 - protein, 9 aa, Homo sapiens
QQWDATPRT

SEQ ID NO: 100322 - protein, 9 aa, Homo sapiens
QQWDGDPRT

SEQ ID NO: 100323 - protein, 9 aa, Homo sapiens
QQWDGFPRT

SEQ ID NO: 100324 - protein, 9 aa, Homo sapiens
QQWDGKPRT

SEQ ID NO: 100325 - protein, 9 aa, Homo sapiens
QQWDGNPRT

SEQ ID NO: 100326 - protein, 9 aa, Homo sapiens
QQWDGRPRT

SEQ ID NO: 100327 - protein, 9 aa, Homo sapiens
QQWDGSPRT

SEQ ID NO: 100328 - protein, 9 aa, Homo sapiens
QQWDGTPRT

SEQ ID NO: 100329 - protein, 9 aa, Homo sapiens
QQWEADPRT

SEQ ID NO: 100330 - protein, 9 aa, Homo sapiens
QQWEAFPRT

SEQ ID NO: 100331 - protein, 9 aa, Homo sapiens
QQWEAKPRT

SEQ ID NO: 100332 - protein, 9 aa, Homo sapiens
QQWEANPRT

SEQ ID NO: 100333 - protein, 9 aa, Homo sapiens
QQWEARPRT

SEQ ID NO: 100334 - protein, 9 aa, Homo sapiens
QQWEASPRT

SEQ ID NO: 100335 - protein, 9 aa, Homo sapiens
QQWEATPRT

SEQ ID NO: 100336 - protein, 9 aa, Homo sapiens
QQWEGDPRT

SEQ ID NO: 100337 - protein, 9 aa, Homo sapiens
QQWEGFPRT

SEQ ID NO: 100338 - protein, 9 aa, Homo sapiens
QQWEGKPRT

SEQ ID NO: 100339 - protein, 9 aa, Homo sapiens
QQWEGNPRT

SEQ ID NO: 100340 - protein, 9 aa, Homo sapiens
QQWEGRPRT

SEQ ID NO: 100341 - protein, 9 aa, Homo sapiens
QQWEGSPRT

SEQ ID NO: 100342 - protein, 9 aa, Homo sapiens
QQWEGTPRT

SEQ ID NO: 100343 - protein, 9 aa, Homo sapiens
QQWHADPRT

SEQ ID NO: 100344 - protein, 9 aa, Homo sapiens
QQWHAFPRT

SEQ ID NO: 100345 - protein, 9 aa, Homo sapiens
QQWHAKPRT

SEQ ID NO: 100346 - protein, 9 aa, Homo sapiens
QQWHANPRT

SEQ ID NO: 100347 - protein, 9 aa, Homo sapiens
QQWHARPRT

SEQ ID NO: 100348 - protein, 9 aa, Homo sapiens
QQWHASPRT

SEQ ID NO: 100349 - protein, 9 aa, Homo sapiens
QQWHATPRT

SEQ ID NO: 100350 - protein, 9 aa, Homo sapiens
QQWHGDPRT

SEQ ID NO: 100351 - protein, 9 aa, Homo sapiens
QQWHGFPRT

SEQ ID NO: 100352 - protein, 9 aa, Homo sapiens
QQWHGKPRT

SEQ ID NO: 100353 - protein, 9 aa, Homo sapiens
QQWHGNPRT

SEQ ID NO: 100354 - protein, 9 aa, Homo sapiens
QQWHGRPRT

SEQ ID NO: 100355 - protein, 9 aa, Homo sapiens
QQWHGSPRT

SEQ ID NO: 100356 - protein, 9 aa, Homo sapiens
QQWHGTPRT

SEQ ID NO: 100357 - protein, 9 aa, Homo sapiens
QQWNADPRT

SEQ ID NO: 100358 - protein, 9 aa, Homo sapiens
QQWNAFPRT

SEQ ID NO: 100359 - protein, 9 aa, Homo sapiens
QQWNAKPRT

SEQ ID NO: 100360 - protein, 9 aa, Homo sapiens
QQWNANPRT

SEQ ID NO: 100361 - protein, 9 aa, Homo sapiens
QQWNARPRT

SEQ ID NO: 100362 - protein, 9 aa, Homo sapiens
QQWNASPRT

SEQ ID NO: 100363 - protein, 9 aa, Homo sapiens
QQWNATPRT

SEQ ID NO: 100364 - protein, 9 aa, Homo sapiens
QQWNGDPRT

SEQ ID NO: 100365 - protein, 9 aa, Homo sapiens
QQWNGFPRT

SEQ ID NO: 100366 - protein, 9 aa, Homo sapiens
QQWNGKPRT

SEQ ID NO: 100367 - protein, 9 aa, Homo sapiens
QQWNGNPRT

SEQ ID NO: 100368 - protein, 9 aa, Homo sapiens
QQWNGRPRT

SEQ ID NO: 100369 - protein, 9 aa, Homo sapiens
QQWNGSPRT

SEQ ID NO: 100370 - protein, 9 aa, Homo sapiens
QQWNGTPRT

SEQ ID NO: 100371 - protein, 9 aa, Homo sapiens
QQWQADPRT

SEQ ID NO: 100372 - protein, 9 aa, Homo sapiens
QQWQAFPRT

SEQ ID NO: 100373 - protein, 9 aa, Homo sapiens
QQWQAKPRT

SEQ ID NO: 100374 - protein, 9 aa, Homo sapiens
QQWQANPRT

SEQ ID NO: 100375 - protein, 9 aa, Homo sapiens
QQWQARPRT

SEQ ID NO: 100376 - protein, 9 aa, Homo sapiens
QQWQASPRT

SEQ ID NO: 100377 - protein, 9 aa, Homo sapiens
QQWQATPRT

SEQ ID NO: 100378 - protein, 9 aa, Homo sapiens
QQWQGDPRT

SEQ ID NO: 100379 - protein, 9 aa, Homo sapiens
QQWQGFPRT

SEQ ID NO: 100380 - protein, 9 aa, Homo sapiens
QQWQGKPRT

SEQ ID NO: 100381 - protein, 9 aa, Homo sapiens
QQWQGNPRT

SEQ ID NO: 100382 - protein, 9 aa, Homo sapiens
QQWQGRPRT

SEQ ID NO: 100383 - protein, 9 aa, Homo sapiens
QQWQGSPRT

SEQ ID NO: 100384 - protein, 9 aa, Homo sapiens
QQWQGTPRT

SEQ ID NO: 100385 - protein, 9 aa, Homo sapiens
QQWSADPRT

SEQ ID NO: 100386 - protein, 9 aa, Homo sapiens
QQWSAFPRT

SEQ ID NO: 100387 - protein, 9 aa, Homo sapiens
QQWSAKPRT

SEQ ID NO: 100388 - protein, 9 aa, Homo sapiens
QQWSANPRT

SEQ ID NO: 100389 - protein, 9 aa, Homo sapiens
QQWSARPRT

SEQ ID NO: 100390 - protein, 9 aa, Homo sapiens
QQWSASPRT

SEQ ID NO: 100391 - protein, 9 aa, Homo sapiens
QQWSATPRT

SEQ ID NO: 100392 - protein, 9 aa, Homo sapiens
QQWSGDPRT

SEQ ID NO: 100393 - protein, 9 aa, Homo sapiens
QQWSGFPRT

SEQ ID NO: 100394 - protein, 9 aa, Homo sapiens
QQWSGKPRT

SEQ ID NO: 100395 - protein, 9 aa, Homo sapiens
QQWSGNPRT

SEQ ID NO: 100396 - protein, 9 aa, Homo sapiens
QQWSGRPRT

SEQ ID NO: 100397 - protein, 9 aa, Homo sapiens
QQWSGSPRT

SEQ ID NO: 100398 - protein, 9 aa, Homo sapiens
QQWSGTPRT

SEQ ID NO: 100399 - protein, 9 aa, Homo sapiens
QQWDADPRT

SEQ ID NO: 100400 - protein, 9 aa, Homo sapiens
NQWDAFPRT

SEQ ID NO: 100401 - protein, 9 aa, Homo sapiens
NQWDAKPRT

SEQ ID NO: 100402 - protein, 9 aa, Homo sapiens
NQWDANPRT

SEQ ID NO: 100403 - protein, 9 aa, Homo sapiens
NQWDARPRT

SEQ ID NO: 100404 - protein, 9 aa, Homo sapiens
NQWDASPRT

SEQ ID NO: 100405 - protein, 9 aa, Homo sapiens
NQWDATPRT

SEQ ID NO: 100406 - protein, 9 aa, Homo sapiens
NQWDGDPRT

SEQ ID NO: 100407 - protein, 9 aa, Homo sapiens
NQWDGFPRT

SEQ ID NO: 100408 - protein, 9 aa, Homo sapiens
NQWDGKPRT

SEQ ID NO: 100409 - protein, 9 aa, Homo sapiens
NQWDGNPRT

SEQ ID NO: 100410 - protein, 9 aa, Homo sapiens
NQWDGRPRT

SEQ ID NO: 100411 - protein, 9 aa, Homo sapiens
NQWDGSPRT

SEQ ID NO: 100412 - protein, 9 aa, Homo sapiens
NQWDGTPRT

SEQ ID NO: 100413 - protein, 9 aa, Homo sapiens
NQWEADPRT

SEQ ID NO: 100414 - protein, 9 aa, Homo sapiens
NQWEAFPRT

SEQ ID NO: 100415 - protein, 9 aa, Homo sapiens
NQWEAKPRT

SEQ ID NO: 100416 - protein, 9 aa, Homo sapiens
NQWEANPRT

SEQ ID NO: 100417 - protein, 9 aa, Homo sapiens
NQWEARPRT

SEQ ID NO: 100418 - protein, 9 aa, Homo sapiens
NQWEASPRT

SEQ ID NO: 100419 - protein, 9 aa, Homo sapiens
NQWEATPRT

SEQ ID NO: 100420 - protein, 9 aa, Homo sapiens
NQWEGDPRT

SEQ ID NO: 100421 - protein, 9 aa, Homo sapiens
NQWEGFPRT

SEQ ID NO: 100422 - protein, 9 aa, Homo sapiens
NQWEGKPRT

SEQ ID NO: 100423 - protein, 9 aa, Homo sapiens
NQWEGNPRT

SEQ ID NO: 100424 - protein, 9 aa, Homo sapiens
NQWEGRPRT

SEQ ID NO: 100425 - protein, 9 aa, Homo sapiens
NQWEGSPRT

SEQ ID NO: 100426 - protein, 9 aa, Homo sapiens
NQWEGTPRT

SEQ ID NO: 100427 - protein, 9 aa, Homo sapiens
NQWHADPRT

SEQ ID NO: 100428 - protein, 9 aa, Homo sapiens
NQWHAFPRT

SEQ ID NO: 100429 - protein, 9 aa, Homo sapiens
NQWHAKPRT

SEQ ID NO: 100430 - protein, 9 aa, Homo sapiens
NQWHANPRT

SEQ ID NO: 100431 - protein, 9 aa, Homo sapiens
NQWHARPRT

SEQ ID NO: 100432 - protein, 9 aa, Homo sapiens
NQWHASPRT

SEQ ID NO: 100433 - protein, 9 aa, Homo sapiens
NQWHATPRT

SEQ ID NO: 100434 - protein, 9 aa, Homo sapiens
NQWHGDPRT

SEQ ID NO: 100435 - protein, 9 aa, Homo sapiens
NQWHGFPRT

SEQ ID NO: 100436 - protein, 9 aa, Homo sapiens
NQWHGKPRT

SEQ ID NO: 100437 - protein, 9 aa, Homo sapiens
NQWHGNPRT

SEQ ID NO: 100438 - protein, 9 aa, Homo sapiens
NQWHGRPRT

SEQ ID NO: 100439 - protein, 9 aa, Homo sapiens
NQWHGSPRT

SEQ ID NO: 100440 - protein, 9 aa, Homo sapiens
NQWHGTPRT

SEQ ID NO: 100441 - protein, 9 aa, Homo sapiens
NQWNADPRT

SEQ ID NO: 100442 - protein, 9 aa, Homo sapiens
NQWNAFPRT

SEQ ID NO: 100443 - protein, 9 aa, Homo sapiens
NQWNAKPRT

SEQ ID NO: 100444 - protein, 9 aa, Homo sapiens
NQWNANPRT

SEQ ID NO: 100445 - protein, 9 aa, Homo sapiens
NQWNARPRT

SEQ ID NO: 100446 - protein, 9 aa, Homo sapiens
NQWNASPRT

SEQ ID NO: 100447 - protein, 9 aa, Homo sapiens
NQWNATPRT

SEQ ID NO: 100448 - protein, 9 aa, Homo sapiens
NQWNGDPRT

SEQ ID NO: 100449 - protein, 9 aa, Homo sapiens
NQWNGFPRT

SEQ ID NO: 100450 - protein, 9 aa, Homo sapiens
NQWNGKPRT

SEQ ID NO: 100451 - protein, 9 aa, Homo sapiens
NQWNGNPRT

SEQ ID NO: 100452 - protein, 9 aa, Homo sapiens
NQWNGRPRT

SEQ ID NO: 100453 - protein, 9 aa, Homo sapiens
NQWNGSPRT

SEQ ID NO: 100454 - protein, 9 aa, Homo sapiens
NQWNGTPRT

SEQ ID NO: 100455 - protein, 9 aa, Homo sapiens
NQWQADPRT

SEQ ID NO: 100456 - protein, 9 aa, Homo sapiens
NQWQAFPRT

SEQ ID NO: 100457 - protein, 9 aa, Homo sapiens
NQWQAKPRT

SEQ ID NO: 100458 - protein, 9 aa, Homo sapiens
NQWQANPRT

SEQ ID NO: 100459 - protein, 9 aa, Homo sapiens
NQWQARPRT

SEQ ID NO: 100460 - protein, 9 aa, Homo sapiens
NQWQASPRT

SEQ ID NO: 100461 - protein, 9 aa, Homo sapiens
NQWQATPRT

SEQ ID NO: 100462 - protein, 9 aa, Homo sapiens
NQWQGDPRT

SEQ ID NO: 100463 - protein, 9 aa, Homo sapiens
NQWQGFPRT

SEQ ID NO: 100464 - protein, 9 aa, Homo sapiens
NQWQGKPRT

SEQ ID NO: 100465 - protein, 9 aa, Homo sapiens
NQWQGNPRT

SEQ ID NO: 100466 - protein, 9 aa, Homo sapiens
NQWQGRPRT

SEQ ID NO: 100467 - protein, 9 aa, Homo sapiens
NQWQGSPRT

SEQ ID NO: 100468 - protein, 9 aa, Homo sapiens
NQWQGTPRT

SEQ ID NO: 100469 - protein, 9 aa, Homo sapiens
NQWSADPRT

SEQ ID NO: 100470 - protein, 9 aa, Homo sapiens
NQWSAFPRT

SEQ ID NO: 100471 - protein, 9 aa, Homo sapiens
NQWSAKPRT

SEQ ID NO: 100472 - protein, 9 aa, Homo sapiens
NQWSANPRT

SEQ ID NO: 100473 - protein, 9 aa, Homo sapiens
NQWSARPRT

SEQ ID NO: 100474 - protein, 9 aa, Homo sapiens
NQWSASPRT

SEQ ID NO: 100475 - protein, 9 aa, Homo sapiens
NQWSATPRT

SEQ ID NO: 100476 - protein, 9 aa, Homo sapiens
NQWSGDPRT

SEQ ID NO: 100477 - protein, 9 aa, Homo sapiens
NQWSGFPRT

SEQ ID NO: 100478 - protein, 9 aa, Homo sapiens
NQWSGKPRT

SEQ ID NO: 100479 - protein, 9 aa, Homo sapiens
NQWSGNPRT

SEQ ID NO: 100480 - protein, 9 aa, Homo sapiens
NQWSGRPRT

SEQ ID NO: 100481 - protein, 9 aa, Homo sapiens
NQWSGSPRT

SEQ ID NO: 100482 - protein, 9 aa, Homo sapiens
NQWSGTPRT

SEQ ID NO: 100483-200108 - skipped (99626 entries)

SEQ ID NO: 200109 - protein, 8 aa, Homo sapiens
GFTFSTYG

SEQ ID NO: 200110 - protein, 8 aa, Homo sapiens
ISGTGRTT

SEQ ID NO: 200111 - protein, 14 aa, Homo sapiens
TKERGDYYYGVFDY

SEQ ID NO: 200112 - protein, 6 aa, Homo sapiens
QTISSW

SEQ ID NO: 200113 - skipped

SEQ ID NO: 200114 - protein, 8 aa, Homo sapiens
QQYHRSWT

SEQ ID NO: 200115 - protein, 121 aa, Homo sapiens
EVQLLESGGGLVQPGKSLRLSCAVSGFTFSTYGMNWVRQAPGKGLEWVSSISGTGRTTYHADSVQGRFTVSRDNSKNILYLQMNSLRADDTAVYFCTKERGDYYYGVFDYWGQGTLVTVSS

SEQ ID NO: 200116 - protein, 106 aa, Homo sapiens
DIQMTQSPSTLSASVGDRVTITCRASQTISSWLAWYQQTPEKAPKLLIYAASNLQSGVPSRFSGSGSGTEFTLTISSLQPDDFATYYCQQYHRSWTFGQGTKVEIT

SEQ ID NO: 200117 - protein, 8 aa, Homo sapiens
GFTFSSYW

SEQ ID NO: 200118 - protein, 8 aa, Homo sapiens
IKEDGSEK

SEQ ID NO: 200119 - protein, 15 aa, Homo sapiens
AREDYDSYYKYGMDV

SEQ ID NO: 200120 - protein, 12 aa, Homo sapiens
QSILYSSNNKNY

SEQ ID NO: 200121 - skipped

SEQ ID NO: 200122 - protein, 9 aa, Homo sapiens
QQYYSTPFT

SEQ ID NO: 200123 - protein, 122 aa, Homo sapiens
EVQLVESGGGLVQPGGSLRLSCAVSGFTFSSYWMSWVRQAPGKGLEWVANIKEDGSEKNYVDSVKGRFTLSSDNAKNSLYLQMNSLRAEDTAVYYCAREDYDSYYKYGMDVWGQGTAVIVSS

SEQ ID NO: 200124 - protein, 113 aa, Homo sapiens
DIVMTQSPDSLAVSLGERATINCKSSQSILYSSNNKNYLAWYQQKPGQPPKLLIYWASTRESGVPDRFSGSGSGTDFTLTISSLQAEDVSVYYCQQYYSTPFTFGPGTKVDIK

SEQ ID NO: 200125 - protein, 8 aa, Homo sapiens
GGSFTGFY

SEQ ID NO: 200126 - protein, 7 aa, Homo sapiens
INHRGNT

SEQ ID NO: 200127 - protein, 13 aa, Homo sapiens
ASPFYDFWSGSDY

SEQ ID NO: 200128 - protein, 11 aa, Homo sapiens
QSLVHSDGNTY

SEQ ID NO: 200129 - skipped

SEQ ID NO: 200130 - protein, 9 aa, Homo sapiens
MQATQFPLT

SEQ ID NO: 200131 - protein, 119 aa, Homo sapiens
QVQLQQWGAGLLKPSETLSLTCAVYGGSFTGFYWSWIRQPPGKGLEWIGEINHRGNTNYNPSLKSRVTMSVDTSKNQFSLNMISVTAADTAMYFCASPFYDFWSGSDYWGQGTLVTVSS

SEQ ID NO: 200132 - protein, 112 aa, Homo sapiens
DIMLTQTPLTSPVTLGQPASISCKSSQSLVHSDGNTYLSWLQQRPGQPPRLLFYKISNRFSGVPDRFSGSGAGTDFTLKISRVEAEDVGVYYCMQATQFPLTFGGGTKVEIK

SEQ ID NO: 200133 - protein, 10 aa, Homo sapiens
  VARIANT 3: note = P, S, D, Q, or N
  VARIANT 5: note = T or R
  VARIANT 6: note = N, T, Y, or H
GYXFXXYGIS

SEQ ID NO: 200134 - protein, 17 aa, Homo sapiens
  VARIANT 4: note = T, P, S, or A
  VARIANT 8: note = N, G, V, K, or A
  VARIANT 9: note = T or K
  VARIANT 10: note = H or N
  VARIANT 13: note = Q or R
  VARIANT 14: note = K or M
  VARIANT 15: note = L or H
WISXYNGXXXYAXXXQG

SEQ ID NO: 200135 - protein, 15 aa, Homo sapiens
  VARIANT 8: note = S or A
  VARIANT 9: note = Y or P
  VARIANT 15: note = V,A, or G
ENYYGSGXXRGGMDX

SEQ ID NO: 200136 - protein, 10 aa, Homo sapiens
GYDFTYYGIS

SEQ ID NO: 200137 - protein, 17 aa, Homo sapiens
WISTYNGNTHYARMLQG

SEQ ID NO: 200138 - protein, 15 aa, Homo sapiens
ENYYGSGAYRGGMDV

SEQ ID NO: 200139 - protein, 11 aa, Homo sapiens
RASQSVSSYLA

SEQ ID NO: 200140 - protein, 7 aa, Homo sapiens
DASNRAT

SEQ ID NO: 200141 - protein, 9 aa, Homo sapiens
QQRSNWPWT

SEQ ID NO: 200142 - protein, 124 aa, Homo sapiens
QVQLVQSGAEVKKPGASVKVSCKASGYDFTYYGISWVRQAPGQGLEWMGWISTYNGNTHYARMLQGRVTMTTDTSTRTAYMELRSLRSDDTAVYYCARENYYGSGAYRGGMDVWGQGTTVTVSS

SEQ ID NO: 200143 - protein, 107 aa, Homo sapiens
EIVLTQSPATLSLSPGERATLSCRASQSVSSYLAWYQQKPGQAPRLLIYDASNRATGIPARFSGSGSGTDFTLTISSLEPEDFAVYYCQQRSNWPWTFGQGTKVEIK

SEQ ID NO: 200144 - protein, 453 aa, Homo sapiens
QVQLVQSGAEVKKPGASVKVSCKASGYDFTYYGISWVRQAPGQGLEWMGWISTYNGNTHYARMLQGRVTMTTDTSTRTAYMELRSLRSDDTAVYYCARENYYGSGAYRGGMDVWGQGTTVTVSSASTKGPSVFPLAPSSKSTSGGTAALGCLVKDYFPEPVTVSWNSGALTSGVHTFPAVLQSSGLYSLSSVVTVPSSSLGTQTYICNVNHKPSNTKVDKKVEPKSCDKTHTCPPCPAPEAAGAPSVFLFPPKPKDTLMISRTPEVTCVVVDVSHEDPEVKFNWYVDGVEVHNAKTKPREEQYNSTYRVVSVLTVLHQDWLNGKEYKCKVSNKALPAPIEKTISKAKGQPREPQVYTLPPSREEMTKNQVSLTCLVKGFYPSDIAVEWESNGQPENNYKTTPPVLDSDGSFFLYSKLTVDKSRWQQGNVFSCSVMHEALHNHYTQKSLSLSPG

SEQ ID NO: 200145 - protein, 214 aa, Homo sapiens
EIVLTQSPATLSLSPGERATLSCRASQSVSSYLAWYQQKPGQAPRLLIYDASNRATGIPARFSGSGSGTDFTLTISSLEPEDFAVYYCQQRSNWPWTFGQGTKVEIKRTVAAPSVFIFPPSDEQLKSGTASVVCLLNNFYPREAKVQWKVDNALQSGNSQESVTEQDSKDSTYSLSSTLTLSKADYEKHKVYACEVTHQGLSSPVTKSFNRGEC

SEQ ID NO: 200146 - protein, 7 aa, Homo sapiens
SRSYYWG

SEQ ID NO: 200147 - protein, 16 aa, Homo sapiens
SIYYNGRTYYNPSLKS

SEQ ID NO: 200148 - protein, 11 aa, Homo sapiens
EDYGDYGAFDI

SEQ ID NO: 200149 - protein, 11 aa, Homo sapiens
RASQGISSALA

SEQ ID NO: 200150 - protein, 7 aa, Homo sapiens
DASSLES

SEQ ID NO: 200151 - protein, 9 aa, Homo sapiens
QQFNSYPLT

SEQ ID NO: 200152 - protein, 121 aa, Homo sapiens
QLQLQESGPGLVKPSETLSLTCTVSGGSISSRSYYWGWIRQPPGKGLEWIGSIYYNGRTYYNPSLKSRVTISVDTSKNQFSLKLSSVTAADTAVYYCAREDYGDYGAFDIWGQGTMVTVSS

SEQ ID NO: 200153 - protein, 107 aa, Homo sapiens [sequence omitted]

SEQ ID NO: 200154 - protein, 7 aa, Homo sapiens
TSNMGVV

SEQ ID NO: 200155 - protein, 16 aa, Homo sapiens
HILWDDREYSNPALKS

SEQ ID NO: 200156 - protein, 14 aa, Homo sapiens
MSRNYYGSSYVMDY

SEQ ID NO: 200157 - protein, 10 aa, Homo sapiens
SASSSVNYMH

SEQ ID NO: 200158 - protein, 7 aa, Homo sapiens
STSNLAS

SEQ ID NO: 200159 - protein, 8 aa, Homo sapiens
HQWNNYGT

SEQ ID NO: 200160 - protein, 124 aa, Homo sapiens
QVTLKESGPALVKPTQTLTLTCTFSGFSLSTSNMGVVWIRQPPGKALEWLAHILWDDREYSNPALKSRLTISKDTSKNQVVLTMTNMDPVDTATYYCARMSRNYYGSSYVMDYWGQGTLVTVSS

SEQ ID NO: 200161 - protein, 106 aa, Homo sapiens
DIQLTQSPSFLSASVGDRVTITCSASSSVNYMHWYQQKPGKAPKLLIYSTSNLASGVPSRFSGSGSGTEFTLTISSLQPEDFATYYCHQWNNYGTFGQGTKVEIKR

SEQ ID NO: 200162 - protein, 5 aa, Homo sapiens
LYGMN

SEQ ID NO: 200163 - protein, 5 aa, Homo sapiens
NYGMN

SEQ ID NO: 200164 - protein, 17 aa, Homo sapiens
WINTYTGEPTYADDFKG

SEQ ID NO: 200165 - protein, 10 aa, Homo sapiens
DTAMDYAMAY

SEQ ID NO: 200166 - protein, 13 aa, Homo sapiens
DYGKYGDYYAMDY

SEQ ID NO: 200167 - protein, 16 aa, Homo sapiens
KSSQNIVHSDGNTYLE

SEQ ID NO: 200168 - protein, 16 aa, Homo sapiens
RSSQSIVHSNGNTYLD

SEQ ID NO: 200169 - protein, 7 aa, Homo sapiens
KVSNRFS

SEQ ID NO: 200170 - protein, 9 aa, Homo sapiens
FQGSHVPLT

SEQ ID NO: 200171 - protein, 119 aa, Homo sapiens
QVQLVQSGSELKKPGASVKVSCKASGYTFTLYGMNWVRQAPGQGLEWMGWINTYTGEPTYADDFKGRFVFSLDTSVSTAYLQISSLKAEDTAVYYCARDTAMDYAMAYWGQGTLVTVSS

SEQ ID NO: 200172 - protein, 119 aa, Homo sapiens
QVQLVQSGSELKKPGASVKVSCKASGYTFTLYGMNWVKQAPGKGLKWMGWINTYTGEPTYADDFKGRFVFSLDTSVSTAYLQISSLKAEDTAVYFCARDTAMDYAMAYWGQGTLVTVSS

SEQ ID NO: 200173 - protein, 122 aa, Homo sapiens
QVQLVQSGSELKKPGASVKVSCKASGYTFTNYGMNWVRQAPGQGLEWMGWINTYTGEPTYADDFKGRFVFSLDTSVSTAYLQISSLKAEDTAVYYCARDYGKYGDYYAMDYWGQGTLVTVSS

SEQ ID NO: 200174 - protein, 122 aa, Homo sapiens
QVQLVQSGSELKKPGASVKVSCKASGYTFTNYGMNWVRQAPGKGLKWMGWINTYTGEPTYADDFKGRFVFSLDTSVSTAYLQISSLKAEDTAVYFCARDYGKYGDYYAMDYWGQGTLVTVSS

SEQ ID NO: 200175 - protein, 113 aa, Homo sapiens
DVVMTQSPLSLPVTLGQPASISCKSSQNIVHSDGNTYLEWFQQRPGQSPRRLIYKVSNRFSGVPDRFSGSGSGTDFTLKISRVEAEDVGVYYCFQGSHVPLTFGGGTKVEIKR

SEQ ID NO: 200176 - protein, 113 aa, Homo sapiens
DVVMTQSPLSLPVTLGQPASISCKSSQNIVHSDGNTYLEWFQQRPGQSPRRLIYKVSNRFSGVPDRFSGSGSGTDFTLKISRVEAEDVGVYYCFQGSHVPLTFGQGTKVEIKR

SEQ ID NO: 200177 - protein, 113 aa, Homo sapiens
DVVMTQTPLSLPVTPGEPASISCKSSQNIVHSDGNTYLEWYLQKPGQSPQLLIYKVSNRFSGVPDRFSGSGSGTDFTLKISRVEAEDLGVYYCFQGSHVPLTFGGGTKVEIKR

SEQ ID NO: 200178 - protein, 113 aa, Homo sapiens
DVVMTQTPLSLPVSLGDQASISCKSSQNIVHSDGNTYLEWYLQKPGQSPKVLIYKVSNRFSGVPDRFSGSGSGTDFTLKISRVEAEDLGVYYCFQGSHVPLTFGGGTKVEIKR

SEQ ID NO: 200179 - protein, 113 aa, Homo sapiens
DVVMTQSPLSLPVTLGQPASISCRSSQSIVHSNGNTYLDWFQQRPGQSPRRLIYKVSNRFSGVPDRFSGSGSGTDFTLKISRVEAEDVGVYYCFQGSHVPLTFGGGTKVEIKR

SEQ ID NO: 200180 - protein, 113 aa, Homo sapiens
DVVMTQSPLSLPVTLGQPASISCRSSQSIVHSNGNTYLDWFQQRPGQSPRRLIYKVSNRFSGVPDRFSGSGSGTDFTLKISRVEAEDVGVYYCFQGSHVPLTFGQGTKVEIKR

SEQ ID NO: 200181 - protein, 113 aa, Homo sapiens
DVVMTQTPLSLPVTPGEPASISCRSSQSIVHSNGNTYLDWYLQKPGQSPQLLIYKVSNRFSGVPDRFSGSGSGTDFTLKISRVEAEDLGVYYCFQGSHVPLTFGGGTKVEIKR

SEQ ID NO: 200182 - protein, 113 aa, Homo sapiens
DVVMTQTPLSLPVSLGDQASISCRSSQSIVHSNGNTYLDWYLQKPGQSPKVLIYKVSNRFSGVPDRFSGSGSGTDFTLKINRVEAEDLGVYFCFQGSHVPLTFGGGTKLEIKR

SEQ ID NO: 200183 - protein, 10 aa, Homo sapiens
GYTFTSSWMH

SEQ ID NO: 200184 - protein, 8 aa, Homo sapiens
IHPNSGGT

SEQ ID NO: 200185 - protein, 14 aa, Homo sapiens
ARGDYYGYVSWFAY

SEQ ID NO: 200186 - protein, 6 aa, Homo sapiens
QNINVL

SEQ ID NO: 200187 - skipped

SEQ ID NO: 200188 - protein, 9 aa, Homo sapiens
QQGQSYPYT

SEQ ID NO: 200189 - protein, 119 aa, Homo sapiens
QVQLQQPGSVLVRPGASVKVSCKASGYTFTSSWMHWAKQRPGQGLEWIGEIHPNSGGTNYNEKFKGKATVDTSSSTAYVDLSSLTSEDSAVYYCARGDYYGYVSWFAYWGQGTLVTVSS

SEQ ID NO: 200190 - protein, 121 aa, Homo sapiens
QVQLVQSGAEVKKPGASVKVSCKASGYTFTSSWMHWARQAPGQGLEWIGEIHPNSGGTNYAQKFQGRATLTVDTSSSTAYMELSRLRSDDTAVYYCARGDYYGYVSWFAYWGQGTLVTVSS

SEQ ID NO: 200191 - protein, 121 aa, Homo sapiens
QVQLVQSGAEVKKPGASVKVSCKASGYTFTSSWMHWARQAPGQGLEWIGEIHPNSGGTNYAQKFQGRATMTVDTSISTAYMELSRLRSDDTAVYYCARGDYYGYVSWFAYWGQGTLVTVSS

SEQ ID NO: 200192 - protein, 121 aa, Homo sapiens
QVQLVQSGAEVKKPGASVKVSCKASGYTFTSSWMHWARQAPGQGLEWIGEIHPNSGGTNYAQKFQGRVTMTVDTSISTAYMELSRLRSDDTAVYYCARGDYYGYVSWFAYWGQGTLVTVSS

SEQ ID NO: 200193 - protein, 121 aa, Homo sapiens
QVQLVQSGAEVKKPGASVKVSCKASGYTFTSSWMHWARQAPGQGLEWMGEIHPNSGGTNYAQKFQGRVTMTVDTSISTAYMELSRLRSDDTAVYYCARGDYYGYVSWFAYWGQGTLVTVSS

SEQ ID NO: 200194 - protein, 107 aa, Homo sapiens
DIQMNQSPSSLSASLGDTITITCHASQNINVLLSWYQQKPGNIPKLLIYKASNLHTGVPSRFSGSGSGTGFTFTISSLQPEDIATYYCQQGQSYPYTFGGGTKLEIK

SEQ ID NO: 200195 - protein, 107 aa, Homo sapiens
DIQMTQSPSSLSASVGDRVTITCQASQDISNYLNWYQQKPGKAPKLLIYDASNLETGVPSRFSGSGSGTDFTFTISSLQPEDIATYYCQQYDNLPYTFGQGTKLEIK

SEQ ID NO: 200196 - protein, 107 aa, Homo sapiens
DIQMTQSPSSLSASVGDRVTITCQASQNINVLLNWYQQKPGKAPKLLIYKASNLHTGVPSRFSGSGSGTDFTFTISSLQPEDIATYYCQQGQSYPYTFGQGTKLEIK

SEQ ID NO: 200197 - protein, 107 aa, Homo sapiens
DIQMNQSPSSLSASVGDRVTITCQASQNINVLLSWYQQKPGKAPKLLIYKASNLHTGVPSRFSGSGSGTDFTFTISSLQPEDIATYYCQQGQSYPYTFGQGTKLEIK

SEQ ID NO: 200198 - protein, 10 aa, Homo sapiens
GYTFTSYDIN

SEQ ID NO: 200199 - protein, 10 aa, Homo sapiens
  VARIANT 8: note = N or Y
WLNPNSGXTG

SEQ ID NO: 200200 - protein, 10 aa, Homo sapiens
EVPETAAFEY

SEQ ID NO: 200201 - protein, 14 aa, Homo sapiens
  VARIANT 10: note = G or A
  VARIANT 11: note = L, S or Q
  VARIANT 14: note = H or L
TSSSSDIGAXXGVX

SEQ ID NO: 200202 - protein, 7 aa, Homo sapiens
GYYNRPS

SEQ ID NO: 200203 - protein, 10 aa, Homo sapiens
  VARIANT 3: note = Y, W, or F
QSXDGTLSAL

SEQ ID NO: 200204 - protein, 119 aa, Homo sapiens
QVQLVQSGAEVKKPGASVKVSCKASGYTFTSYDINWVRQAPGQGLEWMGWLNPNSGNTGYAQKFQGRVTMTADRSTSTAYMELSSLRSEDTAVYYCAREVPETAAFEYWGQGTLVTVSS

SEQ ID NO: 200205 - protein, 111 aa, Homo sapiens
  VARIANT 32..33: note = Any amino acid
  VARIANT 36: note = Any amino acid
  VARIANT 93: note = Any amino acid
QSVLTQPPSVSGAPGQRVTISCTSSSSDIGAXXGVXWYQQLPGTAPKLLIEGYYNRPSGVPDRFSGSKSGTSASLTITGLLPEDEGDYYCQSXDGTLSALFGGGTKLTVLG

SEQ ID NO: 200206 - protein, 119 aa, Homo sapiens; identical to SEQ ID NO: 200204

SEQ ID NO: 200207 - protein, 111 aa, Homo sapiens
QSVLTQPPSVSGAPGQRVTISCTSSSSDIGAGLGVHWYQQLPGTAPKLLIEGYYNRPSGVPDRFSGSKSGTSASLTITGLLPEDEGDYYCQSWDGTLSALFGGGTKLTVLG

SEQ ID NO: 200208 - protein, 119 aa, Homo sapiens
QVQLVQSGAEVKKPGASVKVSCKASGYTFTSYDINWVRQAPGQGLEWMGWLNPNSGYTGYAQKFQGRVTMTADRSTSTAYMELSSLRSEDTAVYYCAREVPETAAFEYWGQGTLVTVSS

SEQ ID NO: 200209 - protein, 111 aa, Homo sapiens
QSVLTQPPSVSGAPGQRVTISCTSSSSDIGAGLGVHWYQQLPGTAPKLLIEGYYNRPSGVPDRFSGSKSGTSASLTITGLLPEDEGDYYCQSYDGTLSALFGGGTKLTVLG

SEQ ID NO: 200210 - protein, 119 aa, Homo sapiens; identical to SEQ ID NO: 200204

SEQ ID NO: 200211 - protein, 111 aa, Homo sapiens
QSVLTQPPSVSGAPGQRVTISCTSSSSDIGAALGVHWYQQLPGTAPKLLIEGYYNRPSGVPDRFSGSKSGTSASLTITGLLPEDEGDYYCQSWDGTLSALFGGGTKLTVLG

SEQ ID NO: 200212 - protein, 119 aa, Homo sapiens; identical to SEQ ID NO: 200204

SEQ ID NO: 200213 - protein, 111 aa, Homo sapiens
QSVLTQPPSVSGAPGQRVTISCTSSSSDIGAGSGVHWYQQLPGTAPKLLIEGYYNRPSGVPDRFSGSKSGTSASLTITGLLPEDEGDYYCQSWDGTLSALFGGGTKLTVLG

SEQ ID NO: 200214 - protein, 119 aa, Homo sapiens; identical to SEQ ID NO: 200204

SEQ ID NO: 200215 - protein, 111 aa, Homo sapiens
QSVLTQPPSVSGAPGQRVTISCTSSSSDIGAGQGVHWYQQLPGTAPKLLIEGYYNRPSGVPDRFSGSKSGTSASLTITGLLPEDEGDYYCQSWDGTLSALFGGGTKLTVLG

SEQ ID NO: 200216 - protein, 119 aa, Homo sapiens; identical to SEQ ID NO: 200204

SEQ ID NO: 200217 - protein, 111 aa, Homo sapiens
QSVLTQPPSVSGAPGQRVTISCTSSSSDIGAGLGVLWYQQLPGTAPKLLIEGYYNRPSGVPDRFSGSKSGTSASLTITGLLPEDEGDYYCQSWDGTLSALFGGGTKLTVLG

SEQ ID NO: 200218 - protein, 119 aa, Homo sapiens; identical to SEQ ID NO: 200208

SEQ ID NO: 200219 - protein, 111 aa, Homo sapiens; identical to SEQ ID NO: 200207

SEQ ID NO: 200220 - protein, 119 aa, Homo sapiens; identical to SEQ ID NO: 200208

SEQ ID NO: 200221 - protein, 111 aa, Homo sapiens; identical to SEQ ID NO: 200213

SEQ ID NO: 200222 - protein, 119 aa, Homo sapiens; identical to SEQ ID NO: 200208

SEQ ID NO: 200223 - protein, 111 aa, Homo sapiens; identical to SEQ ID NO: 200215

SEQ ID NO: 200224 - protein, 119 aa, Homo sapiens; identical to SEQ ID NO: 200208

SEQ ID NO: 200225 - protein, 111 aa, Homo sapiens; identical to SEQ ID NO: 200217

SEQ ID NO: 200226 - protein, 119 aa, Homo sapiens; identical to SEQ ID NO: 200208

SEQ ID NO: 200227 - protein, 111 aa, Homo sapiens
QSVLTQPPSVSGAPGQRVTISCTSSSSDIGAGLGVHWYQQLPGTAPKLLIEGYYNRPSGVPDRFSGSKSGTSASLTITGLLPEDEGDYYCQSFDGTLSALFGGGTKLTVLG

SEQ ID NO: 200228 - protein, 5 aa, Homo sapiens
SYFWS

SEQ ID NO: 200229 - protein, 16 aa, Homo sapiens
YIYYSGNTKYNPSLKS

SEQ ID NO: 200230 - protein, 10 aa, Homo sapiens
ETGSYYGFDY

SEQ ID NO: 200231 - protein, 11 aa, Homo sapiens
RASQSINNYLN

SEQ ID NO: 200232 - protein, 7 aa, Homo sapiens
AASSLQS

SEQ ID NO: 200233 - protein, 9 aa, Homo sapiens
QQSYSTPRT

SEQ ID NO: 200234 - protein, 118 aa, Homo sapiens
QVQLQESGPGLVKPSETLSLTCTVSGGSISSYFWSWIRQPPGKGLEWIGYIYYSGNTKYNPSLKSRVTISIDTSKNQFSLKLSSVTAADTAVYYCARETGSYYGFDYWGQGTLVTVSS

SEQ ID NO: 200235 - protein, 107 aa, Homo sapiens
DIQMTQSPSSLSASVGDRVTITCRASQSINNYLNWYQQRPGKAPKLLIYAASSLQSGVPSRFSGSGSGTDFTLTISSLQPGDFATYYCQQSYSTPRTFGQGTKLEIK

SEQ ID NO: 200236 - protein, 5 aa, Homo sapiens
GYYWN

SEQ ID NO: 200237 - protein, 16 aa, Homo sapiens
EINHAGNTNYNPSLKS

SEQ ID NO: 200238 - protein, 12 aa, Homo sapiens
GYCRSTTCYFDY

SEQ ID NO: 200239 - protein, 12 aa, Homo sapiens
RASQSVRSSYLA

SEQ ID NO: 200240 - protein, 7 aa, Homo sapiens
GASSRAT

SEQ ID NO: 200241 - protein, 8 aa, Homo sapiens
QQYGSSPT

SEQ ID NO: 200242 - protein, 120 aa, Homo sapiens
QVQLQQWGAGLLKPSETLSLTCAVHGGSFSGYYWNWIRQPPGKGLEWIGEINHAGNTNYNPSLKSRVTISLDTSKNQFSLTLTSVTAADTAVYYCARGYCRSTTCYFDYWGQGTLVTVSS

SEQ ID NO: 200243 - protein, 107 aa, Homo sapiens
EIVLTQSPGTLSLSPGERATLSCRASQSVRSSYLAWYQQKPGQAPRLLIYGASSRATGIPDRFSGSGSGTDFTLTISRLEPEDFAVYYCQQYGSSPTFGQGTRLEIK

SEQ ID NO: 200244 - protein, 116 aa, Homo sapiens; identical to SEQ ID NO: 1003

SEQ ID NO: 200245 - protein, 106 aa, Homo sapiens; identical to SEQ ID NO: 1006

SEQ ID NO: 200246 - protein, 10 aa, Homo sapiens
GFDIQDTYMH

SEQ ID NO: 200247 - protein, 17 aa, Homo sapiens
RIDPASGHTKYDPKFQV

SEQ ID NO: 200248 - protein, 7 aa, Homo sapiens
SGGLPDV

SEQ ID NO: 200249 - protein, 10 aa, Homo sapiens
RASSSVSYMY

SEQ ID NO: 200250 - protein, 7 aa, Homo sapiens
ATSNLAS

SEQ ID NO: 200251 - protein, 9 aa, Homo sapiens
QQWSGNPRT

SEQ ID NO: 200252 - protein, 116 aa, Homo sapiens; identical to SEQ ID NO: 10026

SEQ ID NO: 200253 - protein, 106 aa, Homo sapiens; identical to SEQ ID NO: 10028

SEQ ID NO: 200254 - protein, 116 aa, Homo sapiens; identical to SEQ ID NO: 10036

SEQ ID NO: 200255 - protein, 106 aa, Homo sapiens; identical to SEQ ID NO: 490

SEQ ID NO: 200256 - protein, 116 aa, Homo sapiens; identical to SEQ ID NO: 491

SEQ ID NO: 200257 - protein, 106 aa, Homo sapiens; identical to SEQ ID NO: 10042

SEQ ID NO: 200258 - protein, 121 aa, Homo sapiens
EVMLVESGGGLVKPGGSLKLSCAASGFTFTNYAMSWVRQTPEKRLEWVATITSGGSYIYYLDSVKGRFTISRDNAKSTLYLQMSSLRSEDTAIYNCARRKDGNYYYAMDYWGQGTSVTVSS

SEQ ID NO: 200259 - protein, 121 aa, Homo sapiens
EVMLVESGGGLVKPGGSLKLSCAASGFTFTNYAMSWVRQTPEKRLEWVATITSGGSYIYYLDSVKGRFTISRDNAKSTLYLQMSSLRSEDTAIYYCARRKDGNYYYAMDYWGQGTSVTVSS

SEQ ID NO: 200260 - protein, 121 aa, Homo sapiens
EVQLVESGGGLVKPGGSLRLSCAASGFTFTNYAMSWVRQAPGQRLEWVSTITSGGSYIYYLDSVKGRFTISRDNAKSTLYLQMNSLRAEDTAVYNCARRKDGNYYYAMDYWGQGTTVTVSS

SEQ ID NO: 200261 - protein, 121 aa, Homo sapiens
EVQLVESGGGLVKPGGSLRLSCAASGFTFTNYAMSWVRQAPGQRLEWVSTITSGGSYIYYLDSVKGRFTISRDNAKSTLYLQMNSLRAEDTAVYYCARRKDGNYYYAMDYWGQGTTVTVSS

SEQ ID NO: 200262 - protein, 121 aa, Homo sapiens
EVQLLESGGGLVQPGRSLRLSCAASGFTFTNYAMSWVRQAPGQRLEWLATITSGGSYIYYLDSVKGRFTISRDNSKSTLYLQMGSLRAEDMAVYNCARRKDGNYYYAMDYWGQGTTVTVSS

SEQ ID NO: 200263 - protein, 121 aa, Homo sapiens
EVQLLESGGGLVQPGRSLRLSCAASGFTFTNYAMSWVRQAPGQRLEWLATITSGGSYIYYLDSVKGRFTISRDNSKSTLYLQMGSLRAEDMAVYYCARRKDGNYYYAMDYWGQGTTVTVSS

SEQ ID NO: 200264 - protein, 121 aa, Homo sapiens
QVQLVESGGGLIQPGGSLRLSCAASGFTFTNYAMSWVRQARGQRLEWVSTITSGGSYIYYLDSVKGRFTISRDNSKSTLYMELSSLRSEDTAVYNCARRKDGNYYYAMDYWGQGTTVTVSS

SEQ ID NO: 200265 - protein, 121 aa, Homo sapiens
QVQLVESGGGLIQPGGSLRLSCAASGFTFTNYAMSWVRQARGQRLEWVSTITSGGSYIYYLDSVKGRFTISRDNSKSTLYMELSSLRSEDTAVYYCARRKDGNYYYAMDYWGQGTTVTVSS

SEQ ID NO: 200266 - protein, 121 aa, Homo sapiens
QVQLVQSGSELKKPGASVKVSCKASGFTFTNYAMSWVRQAPGKRLEWVSTITSGGSYIYYLDSVKGRFTISRENAKSTLYLQMNSLRTEDTALYNCARRKDGNYYYAMDYWGQGTTVTVSS

SEQ ID NO: 200267 - protein, 121 aa, Homo sapiens
QVQLVQSGSELKKPGASVKVSCKASGFTFTNYAMSWVRQAPGKRLEWVATITSGGSYIYYLDSVKGRFTISRENAKSTLYLQMNSLRTEDTALYYCARRKDGNYYYAMDYWGQGTTVTVSS

SEQ ID NO: 200268 - protein, 121 aa, Homo sapiens
EVQLLQSGAEVKKPGASVKVSCKASGFTFTNYAMSWVRQAPGQRLEWVATITSGGSYIYYLDSVKGRFTISRDNAKSTLHLQMNSLRAEDTAVYNCARRKDGNYYYAMDYWGQGTTVTVSS

SEQ ID NO: 200269 - protein, 121 aa, Homo sapiens
EVQLLQSGAEVKKPGASVKVSCKASGFTFTNYAMSWVRQAPGQRLEWVATITSGGSYIYYLDSVKGRFTISRDNAKSTLHLQMNSLRAEDTAIYYCARRKDGNYYYAMDYWGQGTTVTVSS

SEQ ID NO: 200270 - protein, 121 aa, Homo sapiens
EVMLLQSGAEVKKPGASVKVSCKASGFTFTNYAMSWVRQAPGQRLEWVATITSGGSYIYYLDSVKGRFTISRDNAKSTLHLQMNSLRAEDTAVYYCARRKDGNYYYAMDYWGQGTTVTVSS

SEQ ID NO: 200271 - protein, 111 aa, Homo sapiens
DIVLTQSPASLAVSLGQRATISCRASESVDSYGNSFIHWYQQKAGQPPKLLIYRASNLESGIPARFSGSGSRTDFTLTINPVEADDVATYYCQQSYEDPWTFGGGTKLEIK

SEQ ID NO: 200272 - protein, 111 aa, Homo sapiens
  MOD_RES 108: note = Any amino acid
DIVLTQSPATLSLSPGERATLSCRASESVDSYGNSFIHWYQQKPGQPPKLLIYRASNLESGIPARFSGSGSRTDFTLTISSLEPEDFAVYYCQQSYEDPWTFGGGTKXEIK

SEQ ID NO: 200273 - protein, 111 aa, Homo sapiens
  MOD_RES 108: note = Any amino acid
DIVLTQSPSSLSASVGDRVTITCRASESVDSYGNSFIHWYQQKPGQPPKLLIYRASNLESGIPARFSGSGSRTDFTLTISSLQPEDFATYYCQQSYEDPWTFGGGTKXEIK

SEQ ID NO: 200274 - protein, 111 aa, Homo sapiens
  MOD_RES 108: note = Any amino acid
DIVLTQSPDFQSVTPKEKVTITCRASESVDSYGNSFIHWYQQKPGQPPKLLIYRASNLESGIPARFSGSGSRTDFTLTISSLEAEDAATYYCQQSYEDPWTFGGGTKXEIK

SEQ ID NO: 200275 - protein, 111 aa, Homo sapiens
  MOD_RES 108: note = Any amino acid
DIVLTQTPLSLSVTPGQPASISCRASESVDSYGNSFIHWYQQKPGQPPKLLIYRASNLESGIPARFSGSGSRTDFTLKISRVEAEDVGVYYCQQSYEDPWTFGGGTKXEIK

SEQ ID NO: 200276 - protein, 5 aa, Homo sapiens
TYGMS

SEQ ID NO: 200277 - protein, 17 aa, Homo sapiens
WMNTYSGVTTYADDFKG

SEQ ID NO: 200278 - protein, 13 aa, Homo sapiens
EGYVFDDYYATDY

SEQ ID NO: 200279 - protein, 16 aa, Homo sapiens
RSSQNIVHSDGNTYLE

SEQ ID NO: 200280 - protein, 7 aa, Homo sapiens
KVSNRFS

SEQ ID NO: 200281 - protein, 9 aa, Homo sapiens
FQGSHVPLT

SEQ ID NO: 200282 - protein, 122 aa, Homo sapiens
QIQLVQSGPELKKPGETVKISCKASGYTFTTYGMSWVKQAPGKGLKWMGWMNTYSGVTTYADDFKGRFAFSLETSASTAYMQIDNLKNEDTATYFCAREGYVFDDYYATDYWGQGTSVTVSS

SEQ ID NO: 200283 - protein, 112 aa, Homo sapiens
DVLMTQTPLSLPVSLGDQASISCRSSQNIVHSDGNTYLEWYLQKPGQSPKLLIYKVSNRFSGVPDRFSGSGSGTDFTLKISRVEAEDLGIYYCFQGSHVPLTFGAGTKLELK

SEQ ID NO: 200284 - protein, 5 aa, Homo sapiens
KYDIN

SEQ ID NO: 200285 - protein, 17 aa, Homo sapiens
WIFPGDGRTDYNEKFKG

SEQ ID NO: 200286 - protein, 7 aa, Homo sapiens
YGPAMDY

SEQ ID NO: 200287 - protein, 16 aa, Homo sapiens
RSSQTIVHSNGDTYLD

SEQ ID NO: 200288 - protein, 7 aa, Homo sapiens
KVSNRFS

SEQ ID NO: 200289 - protein, 9 aa, Homo sapiens
FQGSHVPYT

SEQ ID NO: 200290 - protein, 135 aa, Homo sapiens
MGWSWVFLFLLSVTAGVHSQVHLQQSGPELVKPGASVKLSCKASGYTFTKYDINWVRQRPEQGLEWIGWIFPGDGRTDYNEKFKGKATLTTDKSSSTAYMEVSRLTSEDSAVYFCARYGPAMDYWGQGTSVTVAS

SEQ ID NO: 200291 - protein, 131 aa, Homo sapiens
MKLPVRLLVLMFWIPASSSDVLMTQTPLSLPVSLGDQASISCRSSQTIVHSNGDTYLDWFLQKPGQSPKLLIYKVSNRFSGVPDRFSGSGSGTDFTLKISRVEAEDLGVYYCFQGSHVPYTFGGGTKLEIK
